(19) United States
(12) Patent Application Publication
(10) Pub. No.: US 2016/0045591 A1
(43) Pub. Date: Feb. 18, 2016

(54) VACCINE AND THERAPEUTIC DELIVERY SYSTEM

(71) Applicant: The Forsyth Institute, Cambridge, MA (US)

(72) Inventors: Antonio Campos-Neto, Westborough, MA (US); Mark Cayabyab, San Jose, CA (US); Margaret Duncan, Brookline, MA (US)

(21) Appl. No.: 14/604,215

(22) Filed: Jan. 23, 2015

Related U.S. Application Data
(63) Continuation-in-part of application No. 13/624,146, filed on Sep. 21, 2012.
(60) Provisional application No. 61/538,346, filed on Sep. 23, 2011.

(51) Int. Cl. A61K 39/21; A61K 39/04; A61K 45/06; C07K 14/33; C07K 14/35; C07K 14/005; A61K 39/08; C12N 7/00

(52) U.S. Cl. CPC A61K 39/21; A61K 39/08; A61K 39/04; C12N 7/00; C07K 14/33; C07K 14/35; C07K 14/005; A61K 45/06; C12N 2740/16134; C12N 2740/16171; C07K 2319/55; A61K 2039/545

(57) ABSTRACT

The present invention relates to a new vaccine delivery system. In particular, the present invention includes compositions and methods of integrally transformed non-pathogenic, commensal bacteria that can express a nucleic acid molecule of a foreign polypeptide, wherein the nucleic acid molecule that encodes the foreign polypeptide is stably integrated into genomic DNA of the bacteria. The foreign polypeptide includes a vaccine antigen that elicits an immunogenic response, an inhibitor of a pathogen, or an immune booster or modulator.

### RELATED APPLICATIONS

[0001] This application is a continuation-in-part of U.S. application Ser. No. 13/624,146, filed Sep. 21, 2012, which claims the benefit of U.S. Provisional Application No. 61/538,346, filed Sep. 23, 2011, entitled, “Mucosal Vaccination Against Infectious Diseases Delivered By Abundant Commensal Oral Bacteria” by Campos-Neto, Antonio et al.

[0002] The entire teachings of the above application are incorporated herein by reference.

### GOVERNMENT SUPPORT

[0003] The invention was supported, in whole or in part, by a grant R01 AI076425 from National Institutes of Health-National Institute of Allergy and Infectious Disease and by a grant R01DE015931 from National Institutes of Health, National Institute of Dental and Craniofacial Research. The Government has certain rights in the invention.

### BACKGROUND OF THE INVENTION

[0004] Most immunization strategies of current vaccines use protocols that prime and boost the immune system using a parenteral route e.g., intra-dermal, sub-cutaneous and intra-muscular. These means of immunization generate strong systemic immunity but little or no mucosal immunity. In addition, this traditional vaccination protocol, despite inducing both long-lived central memory T cells and short-lived effector T cells, does not sustain a reasonable pool of the latter. These cells, which express CD4 surface antigen and recognize antigenic peptides displayed on the surface of MHC II molecules are the main orchestrators of the immune response. The short-lived T helper cells influence the function of important effector cells including CD8 cytotoxic T cells, antibody producing B lymphocytes and macrophages all of which are important in generation of a successful immune response and subsequent memory.

[0005] The primary reason for using a mucosal route of vaccination is that most infections affect or start from a mucosal surface and that in these infections, topical application of a vaccine is often required to induce a protective immune response. Examples include gastrointestinal infections caused by Helicobacter pylori, Vibrio cholera, and Clostridium difficile; enterotoxigenic infections caused by Escherichia coli; respiratory infections caused by Mycobacterium tuberculosis and Mycoplasma pneumonia; and sexually transmitted genital infections caused by HIV, herpes simplex virus, and Chlamydia trachomatis. Therefore, a need exists for a vaccination method in which mucosal immunity is provided.

[0006] Yet a further need exists for using persistent and abundant commensal oral organisms to deliver antigens for mucosal immunization against infectious diseases. Yet a further need exists for a vaccination protocol that provides generation and maintenance of a significant pool of protective effector and memory T cells.

### SUMMARY OF THE INVENTION

[0007] The present invention relates to integrally transformed non-pathogenic, commensal bacterium that can express one or more nucleic acid molecules of one or more foreign polypeptides therein. The nucleic acid molecule that encodes the foreign polypeptide is stably integrated into genomic DNA of the bacterium. The commensal bacterium used in the present invention includes e.g., one or more of the following: Streptococcus mitis, Streptococcus oxalis, Streptococcus sanguis, Streptococcus salivarius, Streptococcus constellatus, Lactobacillus casei, Lactobacillus fermenti, Veillonella parvula, Prevotella melaninogenica, Eikenella corrodens, Neisseria mucosa, Actinomyces odontolyticus, Fusobacterium periodonticum, Borrelia vincentii, and Actinomyces naeslundii. The nucleic acid molecule of the foreign polypeptide includes an antigen that elicits an immunogenic response in the individual, a vaccine antigen, an inhibitor of a pathogen, an immune booster, a modulator, a composition used in the treatment of a disease or condition, or a combination thereof. Examples of vaccine antigens include Mycobacterium leprae antigens, Mycobacterium tuberculosis antigens, Clostridium difficile antigens, malaria sporozoites and merozoites, diphtheria toxoid, tetanus toxoids, Leishmania antigens, Salmonella antigens, Mycobacterium africanum antigens, Mycobacterium intracellular antigens, Mycobacterium avium antigens, Treponema antigens, Pertussis antigens, Herpes virus antigens, Measles virus antigens, Mumps virus antigens, Shigella antigens, Neisseria antigens, Borrelia antigens, Rabies virus antigens, polio virus antigens, human immunodeficiency virus antigens, snake venom antigens, insect venom antigens, hepatitis A, B, C virus, human papilloma virus antigens, Vibrio cholera, Candida albicans, Candida tropicalis, Paracoccidioides brasiliensis, and the like. Examples of inhibitors of a pathogen are small, antimicrobial peptides (e.g., defensins) that can have an effect against various pathogens, including M. tuberculosis, M. leprae, M. africanum, M. intracellular, M. avium; Clostridium difficile; Malaria; Diphtheria; Leishmania; Salmonella; Treponema; Pertussis; Herpes virus; Measles virus; Mumps virus; Shigella; Neisseria; Borrelia; rabies virus; polio virus; Human and human immunodeficiency virus types I and II; Hepatitis A, B, C virus, Vibrio cholera, Candida albicans, Candida tropicalis, and Paracoccidioides brasiliensis, etc. Immune boosters and/or modulators include e.g., interleukins, interferons, and cytokines such as IL-1, IL-2, IL-4, IL-6, IL-8, IL-12, IL-17, IL-2 IL-21 and IL-22 and cytokines GMCSF, MCSF, MIP1 alpha and beta, TNF alpha and beta, IFNalpha and beta and TGFbeta. Additionally, in an embodiment of the present invention, the nucleic acid molecule of the foreign polypeptide is transformed into a gene that expresses a polypeptide in the cytoplasm, in the cell membrane or cell wall or exports it to the cell surface of the bacterium. In one embodiment, the present invention includes utilizing S. mitis as the non-pathogenic, commensal bacterium, and the gene that expresses or secretes a polypeptide on the bacteria's cell surface is the serine-rich GspB homologue, the pullulanase polypeptide, or both. The present invention also embodies a foreign polypeptide that is a HIV vaccine, a tuberculosis vaccine, malaria vaccine, leishmaniasis vaccine, herpes virus vaccine, hepatitis virus vaccine, or a combination thereof. Examples of the HIV antigen that can be used with the present invention are gpl20 env, gpl40 env, gpl60 env, gag, pol, nef, vif, vpr, vpu, tat, rev, nef or HIV T20 polypeptide inhibitor. In a particular embodiment, the present invention includes commensal bacteria that have a nucleic acid sequence that encodes the HIV T20 polypeptide, the nucleic acid sequence is set forth in SEQ ID NO: 49. The present invention also includes a commensal bacterium that encodes a foreign polypeptide that encodes the HIV T20 polypeptide according to SEQ ID NO: 50. The commensal bacterium, in an aspect, has a nucleic acid molecule that encodes HIV T20 and is inserted into a gene that expresses or secretes a pullulanase polypeptide, to thereby obtain a gene that expresses or secretes an HIV gpl20/pullulanase fusion protein. The nucleic acid molecule of the HIV gpl20/pullulanase fusion protein has a sequence of SEQ ID NO: 51, and encodes a sequence of SEQ ID NO: 52.

[0008] In an embodiment, the integrally transformed non-pathogenic, commensal bacterium can encode a M. tuberculosis antigen having a polypeptide sequence of an amino acid sequence encoded by a nucleic acid molecule. The nucleic acid molecules can be any one of the following: SEQ ID NO: 1, 3, 5, 7, 9, 11, 13, 15, 17, 19, 21, 23, 25, 27, 29, 31, 33, 35, 37, 39, 41, 43, 45, 47, or combination thereof; an amino acid sequence encoded by a coding region of a nucleic acid molecule of SEQ ID NO: 1, 3, 5, 7, 9, 11, 13, 15, 17, 19, 21, 23, 25, 27, 29, 31, 33, 35, 37, 39, 41, 43, 45, 47, or combination thereof; an amino acid sequence encoded by a complement of SEQ ID NO: 1, 3, 5, 7, 9, 11, 13, 15, 17, 19, 21, 23, 25, 27, 29, 31, 33, 35, 37, 39, 41, 43, 45, 47, or combination thereof; an amino acid sequence encoded by a nucleic acid molecule that hybridizes to SEQ ID NO: 1, 3, 5, 7, 9, 11, 13, 15, 17, 19, 21, 23, 25, 27, 29, 31, 33, 35, 37, 39, 41, 43, 45, 47, or combination thereof under high stringency conditions, wherein said conditions comprise 1×SSC, 1% SDS and 0.1-2 mg/ml denatured calf thymus DNA at 65[deg.]C; and an amino acid sequence set forth in SEQ ID NO: 2, 4, 6, 8, 10, 12, 14, 16, 18, 20, 22, 24, 26, 28, 30, 32, 34, 36, 38, 40, 42, 44, 46, 48 or combination thereof.

[0009] In yet another embodiment, the integrally transformed non-pathogenic, commensal bacterium encodes a M. tuberculosis antigen. The TB antigen, for example, is encoded by one of the following nucleic acid sequences: SEQ ID NO: 1, 3, 5, 7, 9, 11, 13, 15, 17, 19, 21, 23, 25, 27, 29, 31, 33, 35, 37, 39, 41, 43, 45, 47, or combination thereof; the coding region of SEQ ID NO: 1, 3, 5, 7, 9, 11, 13, 15, 17, 19, 21, 23, 25, 27, 29, 31, 33, 35, 37, 39, 41, 43, 45, 47, or combination thereof; a complement of SEQ ID NO: 1, 3, 5, 7, 9, 11, 13, 15, 17, 19, 21, 23, 25, 27, 29, 31, 33, 35, 37, 39, 41, 43, 45, 47, or combination thereof; a sequence that hybridizes (e.g., under high stringency conditions) to SEQ ID NO: 1, 3, 5, 7, 9, 11, 13, 15, 17, 19, 21, 23, 25, 27, 29, 31, 33, 35, 37, 39, 41, 43, 45, 47, or combination thereof; and a sequence that encodes SEQ ID NO: 2, 4, 6, 8, 10, 12, 14, 16, 18, 20, 22, 24, 26, 28, 30, 32, 34, 36, 38, 40, 42, 44, 46, 48, or combination thereof. The present invention also relates to integrally transformed bacterium for the delivery of a foreign polypeptide to an individual with a non-pathogenic, commensal bacterium that comprises: a genomic nucleic acid molecule; a nucleic acid molecule having a nucleic acid sequence that encodes the foreign polypeptide, wherein the nucleic acid sequence is inserted into a gene of the genomic nucleic acid molecule whose protein product is expressed in the bacterium's cytoplasm or cell wall or exported to the cell surface of the bacterium; and a nucleic acid molecule having a nucleic acid sequence for the selection of the integrally transformed bacterium. In an aspect, the nucleic acid molecule of the foreign polypeptide expresses an antigen that elicits an immunogenic response in the individual, a vaccine, an inhibitor of a pathogen, an immune booster, a composition used in the treatment of a disease or condition, or a combination thereof. The commensal bacterium can be present or inoculated in an individual in an amount between about 10×10<3> and about 10×10<10>. In an embodiment, the bacterium is commensal to the oral cavity, the upper respiratory tract, or both.

[0010] The present invention also relates to systems for delivering, to an individual, one or more foreign polypeptides that are integrally transformed into non-pathogenic bacteria. The system includes a non-pathogenic, commensal bacterium having a genomic nucleic acid molecule; and a nucleic acid molecule having a nucleic acid sequence that encodes the foreign polypeptide, wherein the nucleic acid sequence is inserted into a gene of the genomic nucleic acid molecule that encodes a polypeptide presented on the cell wall of the bacterium. The nucleic acid molecule of the foreign polypeptide can be an antigen that elicits an immunogenic response in the individual, a vaccine, an inhibitor of a pathogen, an immune booster, a modulator, a composition used in the treatment of a disease or condition, or a combination thereof. The bacteria can include, for example, Streptococcus mitis, Streptococcus oxalis, Streptococcus sanguis, Streptococcus salivarius, Streptococcus constellatus, Lactobacillus casei, Lactobacillus fermenti, Veillonella parvula, Prevotella melaninogenica, Eikenella corrodens, Neisseria mucosa, Actinomyces odontolyticus, Fusobacterium periodonticum, Borrelia vincentii, and Actinomyces naeslundii. The polypeptide expressed by the integrally transformed non-pathogenic, commensal bacterium is described herein.

[0011] The present invention relates to methods of delivering a foreign protein to an individual to induce mucosal immunity. The method includes the steps of contacting the integrally transformed non-pathogenic, commensal bacterium, as described herein, with tissue of the oral cavity or upper respiratory tract of the individual in an amount sufficient for colonization of the bacteria. The amount of the integrally transformed bacterium that is contacted with the oral cavity or upper respiratory tract ranges, for example, between about 1×10<3> and about 1×10<10>. The method can further include subjecting the individual to an antibiotic prior to contacting the integrally transformed non-pathogenic, commensal bacterium with the individual. The method can also include inserting a nucleic acid molecule that expresses the foreign polypeptide into a gene into the genome of the bacterium that expresses or secretes a cell-wall surface protein. Also, the methods can further include ligating a construct comprising a vector having the nucleic acid molecule that encodes the foreign polypeptide, into the gene in the genome of the bacterium that expresses or secretes a cell-wall surface protein.

[0012] The characteristics of the immune response elicited through a mucosal route of vaccination have a number of advantages over parenteral vaccination. First, mucosal immunization results in an abundant production of antigen-specific IgA antibodies at the site of infection. This pathogen-specific response is important not only for the prevention of infection in vaccinated individual, but also helpful in the prevention of a healthy carrier condition and subsequent pathogen transmission to unprotected individuals. Second, in addition to IgA responses, mucosal vaccination elicits systemic IgG responses that correspond to a further defense against pathogens. Such synergistic stimulation of mucosal and systemic antibody production is important for protection against pathogens such as HIV that can infect through both mucosal and systemic route. Third, mucosal immunization at one site results in specific responses at distant sites due to mucosal lymphocyte migration and expression of homing receptors. This is important because defensive immunity against sexually transmitted diseases, for example, can be acquired through oral immunization. Fourth, besides serum IgG and mucosal IgA antibodies, mucosal vaccines have the ability to engage cell mediated responses including T helper and cytotoxic T cell responses, which are important for intracellular pathogen clearance. Mucosal administration of vaccines is also associated with certain important practical advantages. It is non-invasive, does not require the use of needles, eliminates the need for expensive specialized personnel, and is characterized by reduced adverse effects. The development of efficacious vaccines to serious infectious diseases such as tuberculosis and AIDS has an incalculable commercial potential. The extremely high incidence, morbidity and mortality of these diseases associated with the lack of existing vaccines to them, constitute by definition a solid foundation for investment and commercialization of the final product.

### BRIEF DESCRIPTION OF FIGURES

[0013] FIG. 1 is a bar graph showing relative abundance of different strains of commensal bacteria in human oral cavity samples from 225 healthy subjects as determined by DNA-DNA hybridization assay.

[0014] FIG. 2 is a schematic illustrating the strategy for integrating genes for HIV or M. tuberculosis antigens at the 5′ end of the S. mitis pullulanase gene encoding a signal peptide that allows processing and secretion of the M. tuberculosis and HIV antigens. The signal peptide consists of several regions including amino terminal end region (N), a hydrophobic core (H) encoding the transmembrane domain of the peptide, a signal peptidase cleavage site (C), and an accessory sequence transport motif (AST).

[0015] FIG. 3 is a schematic illustrating the strategy for the transformation of S. mitis. M. tuberculosis antigen 85b, HIV antigen HXBc2 or erythromycin resistance gene (ermR) were stably transformed into pulA/SMT0163 gene via homologous recombination. DNA fragments containing either ermR alone (control), HIV/ermR, or 85b/ermR flanked by 250 bp pulA 5′ and 3′ fragments were ligated into a suicide vector (pCR2.1) for transformation and integration at the pulA locus. The table provides the transformation efficiency of each construct by selection on erythromycin containing plates.

[0016] FIG. 4 is a schematic illustrating the results of the genomic polymerase chain reaction (PCR) analysis demonstrating successful integration of HIV HXBc2 gene in the S. mitis. S. mitis specific, HIV specific, and ermR specific fragments were amplified using S. mitis specific primer set A/B, HIV specific primer C, and ermR-specific primer D. Electrophoresis gel image demonstrates that primers A/B generated the expected 250 bp smt0163 PCR product, while primers C and D generated the expected 1 kb product.

[0017] FIG. 5 is a schematic illustrating the results of the genomic PCR analysis demonstrating successful integration of TB 85b gene in the S. mitis. Electrophoresis gel image demonstrates that pulA specific primer x and 85b specific primer y generate the expected 250 bp fragment (lanes 2 and 3).

[0018] FIG. 6 contains three panels, FIG. 6(A), FIG. 6(B) and FIG. 6(C). Panel FIG. 6A is a schematic representation of HIV gpl20 gene containing C-terminal His-tag incorporated into pulA gene by homologous recombination.

[0019] Panel FIG. 6B is a Western blot image demonstrating successful expression of HIV gpl20 antigen (approx. 70 kD peptide fragment) detected by anti-His-tag antibody in recombinant S. mitis cell lysate (lane 3), but not in parent S. mitis cell lysate (lane 2). His-tagged M. tuberculosis protein was used as a positive control (lanel).

[0020] Panel FIG. 6C is a Western blot image demonstrating successful expression of secreted HIV gpl20 antigen (approx. 70 kD peptide) detected by anti-His-tag antibody in bacterial culture supernatant (lane 2 and 4), but not in the supernatant from the parent S. mitis (lane 5-7). His-tagged M. tuberculosis protein was used as a positive control (lanel).

[0021] FIG. 7 contains two panels, FIG. 7(A) and FIG. 7(B). Panel FIG. 7A is a table illustrating the stability of the recombinant S. mitis vector over 30 generations of replication without antibiotic. Four clones HIVgpl20A-D were grown without antibiotic for 30 generations of replication. The table expresses the stability of the recombinant vector as a number of ermR colonies over the total number of colonies streaked Panel FIG. 7B is a Western blot showing that the expression of HIV gpl20 antigen remains unchanged over the 30 generations of replication.

[0022] FIG. 8 contains two panels, FIG. 8(A) and FIG. 8(B). Panels FIGS. 8 A and B are graphical representations showing the ability of r S. mitis to elicit HIV-specific immune response in mice. Intracellular cytokine staining in CD4+ (FIG. 8A) and CD8+ (FIG. 8B) T cells is illustrated in a series of dot plots. IFNy, TNFa, and IL-2 positive cells are detected in HIV-1 immunized animals, but not in saline treated control animals.

[0023] FIG. 9 contains two panels, FIG. 9(A) and FIG. 9(B). Panels FIGS. 9 A and B are graphical representations showing the ability of r S. mitis to elicit HIV-specific immune response in mice. Intracellular cytokine staining in CD4+ (FIG. 9A) and CD8+ (FIG. 9B) T cells is illustrated in a series of dot plots. [Iota][Kappa][Nu][gamma], TNFa, and IL-2 positive cells are detected in HIV-1 immunized animals, but not in sham treated control animals.

[0024] FIG. 10 contains eight panels, FIG. 10(A), FIG. 10(B), FIG. 10(C), FIG. 10(D), FIG. 10(E), FIG. 10(F), FIG. 10(G), and FIG. 10(H). Panels FIGS. 10A-10G are schematics showing the nucleic acid sequences (in Bold) (SEQ ID NO: 1, 3, 5, 7, 9, 11, 13, 15, 17, 19, 21, 23, 25, and 27) and corresponding M. tuberculosis polypeptide sequences (in Bold) (SEQ ID NO: 2, 4, 6, 8, 10, 12, 14, 16, 18, 20, 22, 24, 26, and 28) eluted from MHC class 1 molecules from the macrophages of mice infected with the M. tuberculosis bacteria.

[0025] Panel FIG. 10H is a table showing tuberculosis peptide sequences, SEQ ID Nos: 2, 6, 10, 14, 18, 22, and 26, eluted from MHC class 1 molecules from the macrophages of mice infected with the M. tuberculosis bacteria. The figure also shows The Institute for Genomic Research (TIGR) annotation, the Swiss-Prot designation, and the protein name.

[0026] FIG. 11 is a schematic showing a peptide, SEQ ID NO: 30, in bold, found in the urine of patients with pulmonary tuberculosis, and its corresponding nucleic acid sequence, SEQ ID NO: 29. The figure also shows a DNA sequence (SEQ ID NO: 31) and its corresponding protein sequence (SEQ ID NO: 32) which is a putative molybdopterin biosynthesis protein that is found in M. tuberculosis and has 100% homology to SEQ ID NO: 30.

[0027] FIG. 12 is a table showing tuberculosis peptide sequences, SEQ ID Nos: 34, 38, 42, and 46, found in the urine of patients with pulmonary tuberculosis and the M. tuberculosis donor protein.

[0028] FIG. 13 contains two panels, FIG. 13(A) and FIG. 13(B). Panels FIGS. 13A-B are schematics showing the nucleic acid sequence (in Bold and Underline) (SEQ ID NO: 33) and corresponding M. tuberculosis polypeptide sequence (in Bold and Underline) (SEQ ID NO: 34) found in the urine of patients with pulmonary tuberculosis. Also depicted are homoserine 0-acetyltransferase nucleic acid and polypeptide sequences from M. tuberculosis having 100% homology to the isolated sequences (SEQ ID NOs: 35 and 36, respectively), along with a table providing TIGR locus name, primary locus name, the Swiss-Prot designation, putative identification, gene symbol, TIGR cellular roles, coordinates, DNA molecule name, gene length, protein length, molecular weight, pi, percent GC, enzyme Commission #, Kingdom, and Family.

[0029] FIG. 14 contains three panels, FIG. 14(A), FIG. 14(B), and FIG. 14(C). Panels FIGS. 14A-C are schematics showing the nucleic acid sequence (in Bold and Underline) (SEQ ID NO: 37) and corresponding M. tuberculosis polypeptide sequence (in Bold and Underline) (SEQ ID NO: 38) found in the urine of patients with pulmonary tuberculosis. Also depicted are Chromosome partition protein smc nucleic acid and polypeptide sequences from M. tuberculosis having 100% homology to the isolated sequences (SEQ ID NOs: 39 and 40, respectively), along with a table providing the TIGR locus name, primary locus name, the Swiss-Prot designation, putative identification, gene symbol, TIGR cellular roles, coordinates, DNA molecule name, gene length, protein length, molecular weight, pi, percent GC, enzyme Commission #, Kingdom, and Family.

[0030] FIG. 15 contains two panels, FIG. 15(A) and FIG. 15(B). Panels FIGS. 15 A-B are schematics showing the nucleic acid sequence (in Bold and Underline) (SEQ ID NO: 41) and corresponding M. tuberculosis polypeptide sequence (in Bold and Underline) (SEQ ID NO: 42) found in the urine of patients with pulmonary tuberculosis. Also depicted are ornithine carbamoyltransferase nucleic acid and polypeptide sequences from M. tuberculosis having 100% homology to the isolated sequences (SEQ ID NOs: 43 and 44, respectively), along with a table providing the TIGR locus name, primary locus name, the Swiss-Prot designation, putative identification, gene symbol, TIGR cellular roles, coordinates, DNA molecule name, gene length, protein length, molecular weight, pi, percent GC, enzyme Commission #, Kingdom, and Family.

[0031] FIG. 16 contains two panels, FIG. 16(A) and FIG. 16(B). Panels FIGS. 16 A-B are schematics showing the nucleic acid sequence (in Bold and Underline) (SEQ ID NO: 45) and corresponding M. tuberculosis polypeptide sequence (in Bold and Underline) (SEQ ID NO: 46) found in the urine of patients with pulmonary tuberculosis. Also depicted are phosphoadenosine phosphosulfate reductase nucleic acid and polypeptide sequences from M. tuberculosis having 100%) homology to the isolated sequences (SEQ ID NOs: 47 and 48, respectively), along with a table providing the TIGR locus name, primary locus name, the Swiss-Prot designation, putative identification, gene symbol, TIGR cellular roles, coordinates, DNA molecule name, gene length, protein length, molecular weight, pi, percent GC, enzyme Commission #, Kingdom, and Family.

[0032] FIG. 17 contains five panels, FIG. 17(A), FIG. 17(B), FIG. 17(C), FIG. 17(D), and FIG. 17(E). Panels FIGS. 17A and B are sequence listings showing the nucleic acid sequence (SEQ ID NO: 53) and corresponding polypeptide sequence (SEQ ID NO: 54) of the pula signal peptide.

[0033] Panels FIGS. 17C and D are sequence listings showing the nucleic acid sequence (SEQ ID NO: 51) and corresponding polypeptide sequence (SEQ ID NO: 52) of the pulaHIVgpl20 fusion protein.

[0034] Panel FIG. 17E is a sequence listing showing the nucleic acid sequence (SEQ ID NO: 49) and corresponding polypeptide sequence (SEQ ID NO: 50) of the HIV T20 antigen.

[0035] FIG. 18 is a Western blot showing expression of the TCdA/TCdB recombinant protein from three different r S. mitis clones compared to the wild type bacterium.

[0036] FIG. 19 contains two panels, A and B. Panels A and B are sequence listings showing the nucleic acid sequence (SEQ ID NO: 79) and corresponding polypeptide sequence (SEQ ID NO: 80) of the TCdA/TCdB antigen.

### DETAILED DESCRIPTION OF THE INVENTION

[0037] A description of preferred embodiments of the invention follows.

[0038] The present invention relates to compositions and methods for inducing mucosal immunity using an integrally transformed non-pathogenic commensal bacterium in the oral cavity, upper respiratory tract or both. A foreign polypeptide is integrally transformed into a commensal bacterium to be used as a mucosal vaccine. Mucosal immunity is important for certain diseases such as tuberculosis, acquired immunodeficiency disease syndrome (AIDS), and Clostridium difficile infections. The main protective mechanism of the injectable vaccines is the induction of serum antibodies, mainly IgG, which prevent systemic spread of the pathogen and which can also, through transudation, exert a minor local protective effect at the mucosal surfaces. Mucosal vaccination, however, induces an immune response that more closely resembles natural immunity than the response elicited by injectable vaccine. Mucosally administered vaccine will induce a much stronger mucosal immunity characterized by significantly higher local IgA antibodies and local cell mediated immunity than the injectable vaccine.

[0039] Prior to the present invention, formulations and vaccine delivery systems that targeted the development of a strong mucosal immunity were not tested. Nonetheless, the lung and other mucosal structures are an important battleground site for the successful establishment of infections like tuberculosis, AIDS and other infections. Additionally, the compositions of the present invention utilize immunization protocols that generate and maintain a continuous supply of both effector and long-lived memory T cells. This is an important issue because resistance mediated by effector T cells should be highly dependent on the continuous activation of these cells, which are capable of recognizing invading organisms and quickly respond with production of mediators of resistance like IFN-[gamma].

### Commensal Bacteria

[0040] An important innovative aspect of the present invention is the utilization of the commensal oral organism, S. mitis, as opposed to attenuated strains of virulent bacteria (and viruses) that were previously tested as live antigen delivery vectors. Examples of these systems are Salmonella enteric serovar typhi (S. typhi) and enteric serovar typhimurium (S. typhimurium), Shigella, Vibrio cholerae, Listeria monocytogenes, Mycobacterium bovis (Bacille Calmette-Guerin, BCG), and Yersinia enterocolitica. These vectors impose several restrictions on the downstream steps of vaccine development for human use including poor safety performance and poor long-term colonization. In contrast, S. mitis is an excellent commensal colonizer and abundantly present in the mucosal areas of the normal human oral cavity (FIG. 1) and there are no pending safety issues with the organism making it a highly attractive for use as a delivery vector for mucosal immunization.

[0041] Commensal bacteria are those that are found in the natural flora of living organisms. Commensal bacteria reside mainly within mucosal sites such as mouth, nose, lungs, gastrointestinal and urogenital tracts. Commensal bacteria are also defined as non-pathogenic, meaning that these organisms do not cause disease or conditions that are harmful to the host. Not only do they not cause harm, but also commensal populations are believed to keep pathogenic species in check by not allowing them to adhere to mucosal surfaces. Besides presenting physical barriers to invading pathogens, mucosal surfaces possess specific local immune systems that provide an important component of protective immunity. Antigen delivery directly to mucosal sites via non-pathogenic commensal bacterial vectors provide a substantial advantage over some of the more conventional vaccines in that live bacteria are capable of stimulating persistent systemic as well as local immune responses. Additionally, commensal bacteria are able to colonize the niche invaded by the pathogen and stimulate an immune response at their portal of entry to prevent infection. Commensal bacteria are used with the compositions and methods of the present invention as a delivery vehicle because they colonize well, and are easily administered, cost efficient, and well-tolerated.

[0042] S. mitis is a Gram-positive commensal bacterium (class: bacilli) that abundantly colonizes mucosal surfaces of the oral cavity and upper respiratory tract. S. mitis is generally not motile, does not form spores and lacks group-specific antigens. S. mitis, as well as other strains of commensal bacteria, possesses excellent adjuvant activity for stimulation of cell-mediated immune response, induction of long-term immunological memory and is a very safe candidate for use in recombinant vaccines. Many strains of commensal bacteria that reside on mucosal surfaces are excellent candidates for use as vaccine vehicles into which genetic material of interest can be introduced and successively expressed. The present invention describes such bacterial vehicles for vaccine delivery, whereas integrally transformed non-pathogenic, commensal bacteria is used to express a peptide antigen. Examples of such bacteria include Streptococcus mitis, Streptococcus oxalis, Streptococcus sanguis, Streptococcus salivarius, Streptococcus constellatus, Lactobacillus casei, Lactobacillus fermenti, Veillonella parvula, Prevotella melaninogenica, Eikenella corrodens, Neisseria mucosa, Actinomyces odontolyticus, Fusobacterium periodonticum, Borrelia vincentii, and Actinomyces naeslundii.

### Foreign Polypeptides

[0043] Recombinant commensal bacteria of the present invention are engineered to express foreign polypeptides either on their cell-wall surface or in the secreted form. As used herein, the term “foreign polypeptide” encompasses amino acid chain of any length, including full length proteins (i.e., antigens), wherein their sequence is not encoded by the endogenous bacterial DNA. Foreign polypeptide, in this case, can be any foreign antigen that elicits an immunogenic response including but not limited to a vaccine antigen, an immune booster or modulator of the immune response, pathogen inhibitor, or any combination of the above. Vaccine antigen used with the compositions of present invention refers to any foreign polypeptide that elicits a protective cell mediated and/or humoral immune response and results in a long-term immunological memory. There are several types of antigen-based vaccines including purified and recombinant vaccines. Purified antigen vaccines, also referred to as subunit vaccines, are composed of molecules purified directly from the pathogenic organisms. Purified antigen vaccines identify molecules that generate a protective immune response including structural proteins, polysaccharides, and chemically inactivated or attenuated bacterial toxins (exotoxins). Examples of purified antigen vaccines include Streptococcus pneumoniae and Neisseria meningitidis polysaccharides, and Clostridium difficile and Clostridium tetani toxins. Most purified antigen vaccines require the use of adjuvant to elicit a strong immune response and multiple immunizations are often required.

[0044] Recombinant antigen vaccines are composed of immunogenic proteins produced by genetic engineering. DNA encoding for an immunogenic protein of a pathogen can be inserted into either bacteria, yeast, viruses which infect mammalian cells, or by transfection of mammalian cells. The cells will then produce the protein endogenously and the protein can be harvested.

[0045] Recombinant vector vaccines utilize the attenuated versions of certain microbes as recombinant vectors to express target antigens from other pathogens. The major advantage of recombinant vector vaccines is the ability to generate both humoral and cell-mediated immune responses resulting in stronger, longer-lasting protection. The present invention encompasses methods for the development of recombinant vector vaccines based on commensal bacteria stably transformed with constructs encoding the following: M. leprae antigens, M. tuberculosis antigens, M. africanum antigens, M. tuberculosis intracellular antigens, M. avium antigens, C. difficile antigens, Treponema antigens, Pertussis antigens, Herpes virus antigens, Measles virus antigens, Mumps virus antigens, Shigella antigens, Neisseria antigens, Borrelia antigens, Rabies virus antigens, polio virus antigens, human immunodeficiency virus antigens, snake venom antigens, insect venom antigens, hepatitis A, B, C virus, human papilloma virus antigens, Vibrio cholera, and fungus organisms such as Candida albicans, Candida tropicalis, Paracoccidioides brasiliensis etc. Specific examples include TB and HIV antigenic peptide sequences listed below (SEQ ID NO: 2, 4, 6, 8, 10, 12, 14, 16, 18, 20, 22, 24, 26, 28, 30, 32, 34, 36, 38, 40, 42, 44, 46, 48, or combinations thereof, shown in FIGS. 10-16) and HIV sequences (SEQ ID NO:50, 52 shown in FIG. 17) and C. difficile sequences (SEQ ID NO: 80 shown in FIG. 19).

### An Inhibitor of a Pathogen

[0046] The present invention also describes the development of therapeutic vaccines based on recombinant commensal bacteria expressing a pathogen inhibiting peptide. An inhibitor of pathogen can include any peptide that prevents or reduces the host infection by pathogen by either of the following means inhibition of pathogen interaction with host receptor necessary for infection, inhibition of pathogen replication at the site of entry into the host, inhibition of the assembly of newly formed pathogenic entities (relevant for viral pathogens), and neutralization of toxins released by pathogenic organisms (relevant for bacterial pathogens). One example described in the present invention includes a potent HIV inhibitor peptide, T20, which is a 36 amino acid peptide, expressed by a recombinant S. mitis, that acts as a decoy a-helix and prevents HIV-1 infection by disrupting the assembly of the six-helix bundle viral fusion apparatus by mimicking the heptad repeat 2 (HR2) oligomerization domain of the gp41 envelope glycoprotein. Additionally, present invention includes a foreign polypeptide that includes HIV antigen as follows: gpl20 env, gpl40 env, gpl60 env, gag, pol, nef, vif, vpr, vpu, tat, rev, nef or HIV T20. Additional sequences can be designed to express inhibitors of the following pathogens: Mycobacterium tuberculosis; Mycobacterium leprae; Mycobacterium africanum; Mycobacterium intracellulare; Mycobacterium avium; Clostridium difficile; Malaria; Diphtheria; Leishmania; Salmonella; Treponema; Pertussis; Herpes virus; Measles virus; Mumps virus; Shigella; Neisseria; Borrelia; rabies virus; polio virus; Human immunodeficiency virus type I and II; Hepatitis A, B, C virus, Vibrio cholera; and fungus organisms such as Candida albicans, Candida tropicalis, Paracoccidioides brasiliensis etc. TB vaccines and Mycobacterium vaccine antigens are described in U.S. Pat. No. 7,968,694.

### An Immune Booster and a Modulator

[0047] The present invention describes the use of additional sequences encoding immune booster and modulator for generation of recombinant commensal bacteria based vaccine. Several classes of immune boosters and modulators can be defined, including: interferons, interleukins, and other cytokines Certain mucosal vaccine antigens do not have the ability to induce a potent adaptive immune response and significant immunoglobulin production and therefore an appropriate adjuvant may be required. Cytokines are powerful modulators of the immune response that have the ability to trigger both adaptive and innate immune response by stimulating Th1 and Th2 responses, maturation of antigen presenting cells, and induction of NK cells and CTLs. Therefore, cytokines can be used as potent mucosal vaccine adjuvants for enhancing the immune response against infectious pathogens. Interferons play an important role in the defense against viral pathogens.

[0048] They are part of innate immune response and often induced at an early stage during viral infection. Interferons typically stimulate the cells of the innate immune system to increase the expression of MHC molecules and promote more efficient antigen presentation to helper T cells. Therefore, interferons can also be useful adjuvants in the development of recombinant mucosal vaccines. Examples of immune boosters and modulators include: Interleukins, interferons, and cytokines such as IL-1, IL-2, IL-4, IL-6, IL-8, IL-12, IL-17, IL-2 IL-21 and IL-22 and cytokines GMCSF, MCSF, MIP1 alpha and beta, TNF alpha and beta, IFNalpha and beta and TGFbeta.

### Integrative Transformation

[0049] Bacterial transformation is defined as introduction of foreign genetic material in the form of a DNA plasmid or fragment into bacterial cells resulting in incorporation and expression of exogenous genes by the transformed bacteria. Bacteria that can be transformed are referred to as “competent.” Different methods exist for the induction of bacterial competence including calcium chloride based transformation and electroporation. The mechanism of competence induction is based on the ability to create pores in the cell membrane of the bacteria, which allows passive uptake of plasmid DNA into bacterial cells. Plasmids are small circular pieces of DNA of about 2,000 to 10,000 base pairs that may or may not contain important genetic information for the growth of bacteria. The main components of a plasmid include the origin of replication, multiple cloning site, and antibiotic resistance gene. Recombinant plasmid vectors can be created by introducing a gene of interest into a multiple cloning site followed by selection on antibiotic containing growth media. Transformed bacterial cells containing newly introduced plasmid become antibiotic resistant and successfully survive on antibiotic-rich media. A self-replicating recombinant vector, in this case, is propagated in the bacteria independently of the bacterial genome.

[0050] In contrast, integrative transformation describes the stable introduction of the whole or part of a recombinant vector into the bacterial genome itself. A construct of interest can be engineered to replace one allele in the genome without affecting any other locus of the bacterial chromosome. The method of choice for a stable introduction of a construct into the bacterial genome is known as “homologous recombination.” DNA sequence of the gene to be replaced is known in order to engineer a construct for homologous recombination. The sequence of an engineered construct includes some flanking DNA on both sides that is identical in sequence to the targeted locus.

[0051] The present invention encompasses the construction of a vector for stable integration of the genes coding, for example for M. tuberculosis Ag85b, HIV1 HXBc2 env-His-tag antigens, and C. difficile TcdA and TcdB antigens into the genome of S. mitis. These genes were integrated into the signal sequence of pulA gene, coding for the pullulanase enzyme. Pullulanase is an amylo lytic exoenzyme that is produced as a cell-surface anchored lipoprotein by Gram-positive bacteria. PulA was selected as an integration site because the gene has a strong promoter and encodes localization motifs for the gene product;

furthermore, pulA is not essential for bacterial growth. The recombinant vector was generated by incorporating sequences encoding M. tuberculosis and HIV antigens preceded by an accessory sequence transport motif (AST) next to the peptidase cleavage site (C) (FIG. 2). For stable expression, the M. tuberculosis, HIV antigen, and C. difficile TcdA and TcdB antigen encoding genes along with ermR cassette, flanked on both sides by 250 bp pulA 5′ and 3′ fragments, were integrated via homologous recombination into the pulA gene of S. mitis (FIGS. 3-5). Another vector was constructed in the same manner to incorporate HIV Env gene into S. mitis by homologous recombination (FIG. 6).

### Methods for Immunizing

[0052] Once a foreign gene has been integrated into the genome of the commensal bacterium, the integrant bacteria, such as those of the present invention, can be introduced to an individual in need thereof. The methods of the present invention include methods for vaccinating an individual by inoculating the individual with the integrant commensal bacteria having the foreign polypeptide. Inoculating procedures can include swabbing, spraying, inhaling or otherwise introducing the integrated commensal bacteria to the oral cavity or upper respiratory system. The integrated commensal bacteria used in the invention can be administered nasally, topically, or by inhalation.

[0053] The commensal bacteria should be administered/inoculated in amounts sufficient to result in colonization of the bacteria in the oral cavity, upper respiratory tract, or both. The composition can be administered in a single dose or in more than one dose over a period of time so that the bacteria colonize and the foreign polypeptide confers the desired effect (e.g., is administered to the individual and the individual obtains immunity).

[0054] The actual effective amounts of integrant commensal bacteria of the present invention, delivered with or without a carrier, can vary according to the specific composition being utilized, the mode of administration and the age, weight and condition of the patient. For example, as used herein, an effective amount of bacteria is an amount which allows the bacteria to colonize in the oral cavity and/or upper respiratory system. Dosages for a particular individual patient can be determined by one of ordinary skill in the art using conventional considerations (e.g. by means of an appropriate, conventional pharmacological protocol). In an embodiment, the amount of the commensal bacteria of the present invention used to inoculate an individual ranges in an amount between about 10×10<3> and about 10×10<10>.

[0055] For enteral or mucosal application (including via oral and nasal mucosa), particularly suitable are liquids, drops, or suppositories. A syrup, elixir or the like can be used wherein a sweetened vehicle is employed. Liposomes, microspheres, and microcapsules are available and can be used.

[0056] Pulmonary administration can be accomplished, for example, using any of various delivery devices known in the art such as an inhaler. See. e.g., S. P. Newman (1984) in Aerosols and the Lung, Clarke and Davis (eds.), Butterworths, London, England, pp. 197-224; PCT Publication No. WO 92/16192; PCT Publication No. WO 91/08760.

[0057] The administration of the commensal bacteria (integrants) of the present invention can occur simultaneously or sequentially in time in conjunction with other conventional vaccination systems and protocols or in isolation. A commensal bacterium and/or pharmaceutical composition as described above can be administered simultaneously with or sequentially with an immune enhancer, or other compound known in the art that would be administered with such a vaccine. The compound can be administered before, after or at the same time as the integrated commensal bacteria of the present invention. Thus, the term “co-administration” is used herein to mean that the integrated commensal bacteria and the additional compound (e.g., immune stimulating compound) will be administered at times to achieve an immune response, as described herein. The methods of the present invention are not limited to the sequence in which the compounds are administered, so long as the compound is administered close enough in time to produce the desired effect.

[0058] Routes and frequency of administration of the inventive pharmaceutical compositions and vaccines, as well as dosage, will vary from individual to individual or from system to system. In general, the pharmaceutical compositions and vaccines can be administered intranasally or orally. An example of the protocol for inoculating an individual with integrated commensal bacteria is as follows: inoculate three times, one month apart between inoculations.

[0059] The compositions of the present invention are preferably formulated as either pharmaceutical compositions or as vaccines for in the induction of protective immunity against the foreign polypeptide in a patient. A patient can be afflicted with a disease, or can be free of detectable disease and/or infection. In other words, protective immunity can be induced to prevent, reduce the severity of, or treat the disease associated with the foreign bacteria.

[0060] In one embodiment, pharmaceutical compositions of the present invention comprise one or more of the integrated commensal bacteria, and a physiologically acceptable carrier. Similarly, integrated commensal bacteria comprise one or more the above polypeptides and a non-specific immune response enhancer, such as an adjuvant or a liposome (into which the polypeptide is incorporated).

[0061] The integrant commensal bacteria of the present invention can be administered with or without a carrier. The terms “pharmaceutically acceptable carrier” or a “carrier” refer to any generally acceptable excipient or drug delivery composition that is relatively inert and non-toxic. Exemplary carriers include sterile water, salt solutions (such as Ringer's solution), alcohols, gelatin, talc, viscous paraffin, fatty acid esters, hydroxymethylcellulose, polyvinyl pyrolidone, calcium carbonate, carbohydrates (such as lactose, sucrose, dextrose, mannose, albumin, starch, cellulose, silica gel, polyethylene glycol (PEG), dried skim milk, rice flour, magnesium stearate, and the like. Suitable formulations and additional carriers are described in Remington's Pharmaceutical Sciences, (17th Ed., Mack Pub. Co., Easton, Pa.). Such preparations can be sterilized and, if desired, mixed with auxiliary agents, e.g., lubricants, preservatives, stabilizers, wetting agents, emulsifiers, salts for influencing osmotic pressure, buffers, coloring, preservatives and/or aromatic substances and the like which do not deleteriously react with the active compounds. Typical preservatives can include, potassium sorbate, sodium metabisulfite, methyl paraben, propyl paraben, thimerosal, etc. The compositions can also be combined where desired with other active substances, e.g., enzyme inhibitors, to reduce metabolic degradation. A carrier (e.g., a pharmaceutically acceptable carrier) is preferred, but not necessary to administer the compound.

[0062] The composition can be a liquid solution, suspension, emulsion, sustained release formulation, gel, mist, or spray. The method of administration can dictate how the composition will be formulated. For example, the composition can be formulated as a suppository, with traditional binders and carriers such as triglycerides.

### Measuring the Immunogenicity of the Vaccine

[0063] Once the commensal bacteria are administered to the individual, an individual can be assessed to determine if the vaccine provided an immunogenic response to the foreign polypeptide. The efficacy of a mucosal immunization can be measured by determining the immunogenic response of the person who received the vaccine. The foreign peptides described herein expressed on the surface of recombinant S. mitis (r S. mitis) have the ability to elicit an immune response. More precisely, administration of r S. mitis results in activation of the components of cell mediated immunity, specifically CD4+ and CD8+ T cells, NK cells, B cells and/or macrophages, leading to proliferation and cytokine production including but not limited to IFNy, TNFa and IL-2 in an immunized individual. Immunological evaluation methods for cell mediated immune response include antigen specific stimulation of cells followed by measurements of secreted cytokines by enzyme-linked immunosorbent assay (ELISA) or multiplex bead assay, measurement of intracellular cytokine levels by flow cytometry, as well as measurements of cell proliferation.

[0064] The ability of a polypeptide or bacterial lysate to stimulate the secretion of cytokines can be evaluated by contacting the cells with the polypeptide and measuring cytokine levels in the supernatant. In general, the amount of polypeptide that is sufficient for the evaluation of about 10<5> cells ranges from about 10 ng/mL to about 100 [mu]g/mL and preferably is about 10 [mu]g/mL. The polypeptide can, but need not, be immobilized on a solid support, such as a bead or a biodegradable microsphere, such as those described in U.S. Pat. Nos. 4,897,268 and 5,075,109. The incubation of polypeptide with the cells is typically performed at 37[deg.] C. for about six days. Following incubation with polypeptide, the culture supematants are assayed for IFN-[gamma] (and/or TNFa and IL-2), which can be evaluated by methods known to those of ordinary skill in the art, such as an enzyme-linked immunosorbent assay (ELISA). In general, a polypeptide that results in the production of at least 50 pg of interferon [gamma] per mL of cultured supernatant (containing 10<4>-10<5> T cells per mL) is considered able to stimulate the production of IFN-[gamma]. A polypeptide that stimulates the production of at least 100 pg/mL of TNF [alpha], and/or at least 10 U/mL of IL-2, per 10<5> T cells (or per 3×10<5> PBMC) is considered able to stimulate the production of TNF a and/or IL-2.

[0065] Intracellular cytokine staining is a flow cytometric technique that can detect single cell expression of cytokines and allows simultaneous detection, quantitation, and phenotypic characterization of antigen-specific T cells in PBMC. In this multiparametric flow cytometry based method, antigen specific T cells are identified based on their intracellular accumulation of a cytokine in conjunction with their characteristic CD4+ and CD8+ T cells, activation, effector, memory and mucosal homing surface markers following antigenic stimulation of PBMC. Intracellular cytokine staining assay is performed on PBMC isolated from whole blood of immunized individual by Ficoll gradient centrifugation. Cells are then restimulated by contact with polypeptide (e.g., an immunogenic antigen, or a portion or other variant thereof) or recombinant bacterial lysate for 6-10 hours at 37 C. Restimulated cells are then permeabilized and contacted with fluorescently labeled monoclonal antibodies against interferon [gamma], TNFa, IL-2, and granzyme) as well as antibodies against surface markers characteristic for particular cell type. Percent of IFN-[gamma], TNFa, and IL-2 positive cells is then determined using appropriate software (FIGS. 8, 9). A polypeptide that stimulates statistically significant increase in the number of IFN-[gamma], TNFa, and IL-2 positive cells when compared to control is considered able to stimulate cytokine production.

Polypeptides and their Function

[0066] The present invention relates to polypeptide molecules encoded by the recombinant commensal bacteria including antigenic portions of TB, HIV, Plasmodium, Leishmania, herpes virus, or hepatitis virus. The present invention includes polypeptide molecules that are encoded by the nucleic acid of the recombinant commensal bacteria and which contain the sequence of any one of the antigenic TB amino acid sequences (e.g., SEQ ID NO: 2, 4, 6, 8, 10, 12, 14, 16, 18, 20, 22, 24, 26, 28, 30, 32, 34, 36, 38, 40, 42, 44, 46, 48, or combinations thereof, shown FIGS. 10-16) or HIV sequences (e.g., SEQ ID NO: 50, 52 shown in FIG. 17), or any of the above fused to the pulA signal peptide. The present invention also pertains to polypeptide molecules that are encoded by nucleic acid sequence of the transformed commensal bacteria and that include the nucleic acid sequences of SEQ ID NO: 1, 3, 5, 7, 9, 11, 13, 15, 17, 19, 21, 23, 25, 27, 29, 31, 33, 35, 37, 39, 41, 43, 45, 47, or combinations thereof.

[0067] As used herein, the term “polypeptide” encompasses amino acid chains of any length, including full length proteins (i.e., antigens), wherein the amino acid residues are linked by covalent peptide bonds. Thus, a polypeptide comprising an immunogenic portion of any of the above named antigens can consist entirely of the immunogenic portion, or can contain additional sequences. The additional sequences can be derived from the native antigens or can be heterologous, and such sequences can (but need not) be immunogenic.

[0068] The compositions and methods of the present invention also encompass variants of the above polypeptides and DNA molecules. A polypeptide “variant,” as used herein, is a polypeptide that differs from the recited polypeptide only in conservative substitutions and/or modifications, such that the therapeutic, antigenic and/or immunogenic properties of the polypeptide are retained. A variant of a specific antigen will therefore stimulate cell proliferation and/or interferon production in Th1 cells raised against that specific antigen. Polypeptide variants preferably exhibit at least about 70%, more preferably at least about 90% and most preferably at least about 95% homology to the identified polypeptides. For polypeptides with immunoreactive properties, variants can, alternatively, be identified by modifying the amino acid sequence of one of the above polypeptides, and evaluating the immunoreactivity of the modified polypeptide. Such modified sequences can be prepared and tested using, for example, the representative procedures described herein.

[0069] As used herein, a “conservative substitution” is one in which an amino acid is substituted for another amino acid that has similar properties, such that one skilled in the art of peptide chemistry would expect the secondary structure and hydropathic nature of the polypeptide to be substantially unchanged.

[0070] Variants can also, or alternatively, contain other modifications, including the deletion or addition of amino acids that have minimal influence on the antigenic properties, secondary structure and hydropathic nature of the polypeptide. For example, a polypeptide can be conjugated to a signal (or leader) sequence at the N-terminal end of the protein which co-translationally or post-translationally directs transfer of the protein. The polypeptide can also be conjugated to a linker or other sequence for ease of synthesis, purification or identification of the polypeptide (e.g., poly-His), or to enhance binding of the polypeptide to a solid support. For example, a polypeptide can be conjugated to an immunoglobulin Fc region.

[0071] The present invention also encompasses proteins and polypeptides, variants thereof, or those having amino acid sequences analogous to the amino acid sequences of antigenic polypeptides described herein. Such polypeptides are defined herein as antigenic analogs (e.g., homologues), or mutants or derivatives. “Analogous” or “homologous” amino acid sequences refer to amino acid sequences with sufficient identity of any one of the amino acid sequences so as to possess the biological activity (e.g., the ability to elicit a protective immune response to antigen expressed by commensal bacteria) of any one of the native polypeptides. For example, an analog polypeptide can be produced with “silent” changes in the amino acid sequence wherein one, or more, amino acid residues differ from the amino acid residues of any one of the protein, yet still possesses the function or biological activity of the antigen peptide. Examples of such differences include additions, deletions or substitutions of residues of the amino acid sequence of antigen peptides. Also encompassed by the present invention are analogous polypeptides that exhibit greater, or lesser, biological activity of any one of the proteins of the present invention. Such polypeptides can be expressed by mutating (e.g., substituting, deleting or adding) nucleic acid residues of any of the sequences described herein. Such mutations can be performed using methods described herein and those known in the art. In particular, the present invention relates to homologous polypeptide molecules having at least about 70% (e.g., 75%, 80%, 85%, 90% or 95%) identity or similarity with SEQ ID NO: 2, 4, 6, 8, 10, 12, 14, 16, 18, 20, 22, 24, 26, 28, 30, 32, 34, 36, 38, 40, 42, 44, 46, 48, or combination thereof. Percent “identity” refers to the amount of identical nucleotides or amino acids between two nucleotides or amino acid sequences, respectfully. As used herein, “percent similarity” refers to the amount of similar or conservative amino acids between two amino acid sequences.

[0072] Homologous polypeptides can be determined using methods known to those of skill in the art. Initial homology searches can be performed at NCBI against the GenBank, EMBL and SwissProt databases using, for example, the BLAST network service. Altschuler, S. F., et al, J. Mol. Biol, 215:403 (1990), Altschuler, S. F., Nucleic Acids Res., 25:3389-3402 (1998). Computer analysis of nucleotide sequences can be performed using the MOTIFS and the FindPatterns subroutines of the Genetics Computing Group (GCG, version 8.0) software. Protein and/or nucleotide comparisons were performed according to Higgins and Sharp (Higgins, D. G. and Sharp, P. M., Gene, 73:237-244 (1988) e.g., using default parameters).

[0073] Additionally, the individual isolated polypeptides of the present invention are biologically active or functional and play various roles in bacteria as well. For example, an isolated polypeptide, such as SEQ ID NO: 6 is a glutamine-transport transmembrane protein ABC transporter. Likewise, SEQ ID NO: 22 is a cationic amino acid transport integral member protein, and SEQ ID NO: 26 is a cationic transporting P-type ATPase. SEQ ID NO: 32, is a molybdopterin biosynthesis protein. The present invention includes fragments of these isolated amino acid sequences that still possess the function or biological activity of the sequence. For example, polypeptide fragments comprising deletion mutants of the antigenic TB proteins can be designed and expressed by well-known laboratory methods. Fragments, homologues, or analogous polypeptides can be evaluated for biological activity, as described herein.

[0074] The present invention also encompasses biologically active derivatives or analogs of the above described antigenic polypeptides, referred to herein as peptide mimetics. Mimetics can be designed and produced by techniques known to those of skill in the art. (see e.g., U.S. Pat. Nos. 4,612,132; 5,643,873 and 5,654,276). These mimetics can be based, for example, on a specific amino acid sequence and maintain the relative position in space of the corresponding amino acid sequence. These peptide mimetics possess biological activity similar to the biological activity of the corresponding peptide compound, but possess a “biological advantage” over the corresponding antigenic TB amino acid sequence with respect to one, or more, of the following properties: solubility, stability and susceptibility to hydrolysis and proteolysis.

[0075] Methods for preparing peptide mimetics include modifying the N-terminal amino group, the C-terminal carboxyl group, and/or changing one or more of the amino linkages in the peptide to a non-amino linkage. Two or more such modifications can be coupled in one peptide mimetic molecule. Modifications of peptides to produce peptide mimetics are described in U.S. Pat. Nos. 5,643,873 and 5,654,276. Other forms of the antigenic polypeptides, encompassed by the present invention, include those which are “functionally equivalent.” This term, as used herein, refers to any nucleic acid sequence and its encoded amino acid, which mimics the biological activity of the polypeptides and/or functional domains thereof.

### Nucleic Acid Sequences, Plasmids, Vectors and Host Cells

[0076] The present invention, in one embodiment, includes an isolated nucleic acid molecule integrated into the commensal bacteria, having a sequence of SEQ ID NO: 1, 3, 5, 7, 9, 11, 13, 15, 17, 19, 21, 23, 25, 27, 29, 31, 33, 35, 37, 39, 41, 43, 45, 47, or combinations thereof. See FIGS. 10-17. The present invention includes sequences as recited in FIGS. 10-17, as well as the coding regions thereof.

[0077] As used herein, the terms “DNA molecule” or “nucleic acid molecule” include both sense and anti-sense strands, cDNA, genomic DNA, recombinant DNA, RNA, and wholly or partially synthesized nucleic acid molecules. A nucleotide “variant” is a sequence that differs from the recited nucleotide sequence in having one or more nucleotide deletions, substitutions or additions. Such modifications can be readily introduced using standard mutagenesis techniques Nucleotide variants can be naturally occurring allelic variants, or non-naturally occurring variants. Variant nucleotide sequences preferably exhibit at least about 70%, more preferably at least about 80%> and most preferably at least about 90%> homology to the recited sequence. Such variant nucleotide sequences will generally hybridize to the recited nucleotide sequence under stringent conditions. In one embodiment, “stringent conditions” refers to prewashing in a solution of 6×SSC, 0.2%> SDS; hybridizing at 65<0> Celsius, 6×SSC, 0.2%> SDS overnight; followed by two washes of 30 minutes each in 1×SSC, 0.1% SDS at 65<0> C. and two washes of 30 minutes each in 0.2×SSC, 0.1% SDS at 65 [deg.] C.

[0078] The present invention also encompasses genomic commensal DNA having isolated nucleic acid sequences that encode TB and HIV polypeptides, and in particular, those which encode a polypeptide molecule having an amino acid sequence of SEQ ID NO: 2, 4, 6, 8, 10, 12, 14, 16, 18, 20, 22, 24, 26, 28, 30, 32, 34, 36, 38, 40, 42, 44, 46, 48, or combinations thereof. These nucleic acid sequences encode polypeptides that stimulate a protective immunogenic response and/or are involved the functions further described herein. As used herein, an “isolated” gene or nucleotide sequence which is not flanked by nucleotide sequences which normally (e.g., in nature) flank the gene or nucleotide sequence (e.g., as in genomic sequences) and/or has been completely or partially purified from other transcribed sequences (e.g., as in a cDNA or R A library). Thus, an isolated gene or nucleotide sequence can include a gene or nucleotide sequence which is synthesized chemically or by recombinant means. Nucleic acid constructs contained in a vector are included in the definition of “isolated” as used herein. Also, isolated nucleotide sequences include recombinant nucleic acid molecules and heterologous host cells, as well as partially or substantially or purified nucleic acid molecules in solution. In vivo and in vitro RNA transcripts of the present invention are also encompassed by “isolated” nucleotide sequences. Such isolated nucleotide sequences are useful for the manufacture of the encoded antigenic TB polypeptide, for detecting the presence (e.g., by PCR amplification and DNA sequencing) or expression (e.g., by reverse transcription (RT)-PCR and DNA sequencing) of related genes in cells or tissue, and for gene mapping (e.g., by in situ hybridization).

[0079] The antigenic nucleic acid sequences of the present invention include homologous nucleic acid sequences. “Analogous” or “homologous” nucleic acid sequences refer to nucleic acid sequences with sufficient identity of any one of the TB nucleic acid sequences, such that once encoded into polypeptides, they possess the biological activity of any one of the antigenic polypeptides described herein. For example, an analogous nucleic acid molecule can be produced with “silent” changes in the sequence wherein one, or more, nucleotides differs from the nucleotides of any one of the polypeptides described herein, yet, once encoded into a polypeptide, still possesses its function or biological activity. Examples of such differences include additions, deletions or substitutions. Also encompassed by the present invention are nucleic acid sequences that encode analogous polypeptides that exhibit greater, or lesser, biological activity of the TB proteins of the present invention. In particular, the present invention is directed to nucleic acid molecules having at least about 70% (e.g., 75%, 80%, 85%, 90% or 95%) identity with SEQ ID NO: 1, 3, 5, 7, 9, 11, 13, 15, 17, 19, 21, 23, 25, 27, 29, 31, 33, 35, 37, 39, 41, 43, 45, 47, or combinations thereof.

[0080] The nucleic acid molecules of the present invention, including the full length sequences, the partial sequences, functional fragments and homologues, once encoded into polypeptides, elicit a specific immunogenic TB response, or has the function of the polypeptide, as further described herein. The homologous nucleic acid sequences can be determined using methods known to those of skill in the art, and by methods described herein including those described for determining homologous polypeptide sequences.

[0081] Also encompassed by the present invention are nucleic acid sequences, DNA or R A, which are substantially complementary to the DNA sequences encoding the antigenic polypeptides of the present invention. Such sequences can be used to design PCR primers to amplify and isolate homologous DNA coding sequences from related Mycobacteria spp. The present invention includes sequences those that specifically hybridize under conditions of stringency known to those of skill in the art. As defined herein, substantially complementary means that the nucleic acid need not reflect the exact sequence of the TB sequences, but must be sufficiently similar in sequence to permit hybridization with TB nucleic acid sequence under high stringency conditions. For example, non-complementary bases can be interspersed in a nucleotide sequence, or the sequences can be longer or shorter than the TB nucleic acid sequence, provided that the sequence has a sufficient number of bases complementary to the TB sequence to allow hybridization therewith. Conditions for stringency are described in e.g., Ausubel, F. M., et al, Current Protocols in Molecular Biology, (Current Protocol, 1994), and Brown, et al, Nature, 366:575 (1993); and further defined in conjunction with certain assays.

[0082] In another embodiment, the present invention includes genomic DNA that has nucleic acid molecules (e.g., probes or primers) that hybridize to the antigenic sequences, SEQ ID NO: 1, 3, 5, 7, 9, 11, 13, 15, 17, 19, 21, 23, 25, 27, 29, 31, 33, 35, 37, 39, 41, 43, 45, 47, or combinations thereof under high or moderate stringency conditions. In one aspect, the present invention includes molecules that hybridize or contain at least about 20 contiguous nucleotides or longer in length (e.g., 50, 100, 200, 300, 400, 500, 600, 700, 800, 900, 1000, 1100, 1200, 1300, 1400, 1500, 1600, 1700, 1800, 1900, 2000, 2100, 2200, 2300, 2400, 2500, 2600, 2700, 2800, 2900, 3000, 3100, 3200, 3300, 3400, 3500, 3600, 3700, 3800, 3900, or 4000). Such molecules hybridize to one of the TB nucleic acid sequences under high stringency conditions. The present invention includes such molecules and those that encode a polypeptide that has the functions or biological activity described herein.

[0083] Typically the nucleic acid probe comprises a nucleic acid sequence (e.g. SEQ ID NO: 1, 3, 5, 7, 9, 11, 13, 15, 17, 19, 21, 23, 25, 27, 29, 31, 33, 35, 37, 39, 41, 43, 45, 47, or combinations thereof) and is of sufficient length and complementarity to specifically hybridize to a nucleic acid sequence that encodes an antigenic polypeptide. For example, a nucleic acid probe can be at least about 5%, 10%, 20%, 30%, 40%, 50%, 60%, 70%, 80% or 90% the length of the TB nucleic acid sequence. The requirements of sufficient length and complementarity can be easily determined by one of skill in the art. Suitable hybridization conditions (e.g., high stringency conditions) are also described herein. Additionally, the present invention encompasses fragments of the polypeptides of the present invention or nucleic acid sequences that encodes a polypeptide wherein the polypeptide has the biologically activity of the polypeptides recited herein.

[0084] Such fragments are useful as probes for assays described herein, and as experimental tools, or in the case of nucleic acid fragments, as primers. A preferred embodiment includes primers and probes which selectively hybridize to the nucleic acid constructs encoding any one of the recited polypeptides. For example, nucleic acid fragments which encode any one of the domains described herein are also implicated by the present invention.

[0085] Stringency conditions for hybridization refers to conditions of temperature and buffer composition which permit hybridization of a first nucleic acid sequence to a second nucleic acid sequence, wherein the conditions determine the degree of identity between those sequences which hybridize to each other. Therefore, “high stringency conditions” are those conditions wherein only nucleic acid sequences which are very similar to each other will hybridize. The sequences can be less similar to each other if they hybridize under moderate stringency conditions. Still less similarity is needed for two sequences to hybridize under low stringency conditions. By varying the hybridization conditions from a stringency level at which no hybridization occurs, to a level at which hybridization is first observed, conditions can be determined at which a given sequence will hybridize to those sequences that are most similar to it. The precise conditions determining the stringency of a particular hybridization include not only the ionic strength, temperature, and the concentration of destabilizing agents such as formamide, but also factors such as the length of the nucleic acid sequences, their base composition, the percent of mismatched base pairs between the two sequences, and the frequency of occurrence of subsets of the sequences (e.g., small stretches of repeats) within other non-identical sequences. Washing is the step in which conditions are set so as to determine a minimum level of similarity between the sequences hybridizing with each other. Generally, from the lowest temperature at which only homologous hybridization occurs, a 1% mismatch between two sequences results in a 1[deg.] C. decrease in the melting temperature (Tm) for any chosen SSC concentration. Generally, a doubling of the concentration of SSC results in an increase in the Tm of about 17[deg.] C. Using these guidelines, the washing temperature can be determined empirically, depending on the level of mismatch sought. Hybridization and wash conditions are explained in Current Protocols in Molecular Biology (Ausubel, F. M. et al, eds., John Wiley & Sons, Inc., 1995, with supplemental updates) on pages 2.10.1 to 2.10.16, and 6.3.1 to 6.3.6.

[0086] High stringency conditions can employ hybridization at either (1) 1×SSC (10×SSC=3M NaCl, 0.3M Na3-citrate . . . 2H20 (88 g/liter), pH to 7.0 with 1M HCl), 1% SDS (sodium dodecyl sulfate), 0.1-2 mg/ml denatured calf thymus DNA at 65[deg.] C., (2) 1×SSC, 50% formamide, 1% SDS, 0.1-2 mg/ml denatured calf thymus DNA at 42[deg.] C., (3) 1% bovine serum albumin (fraction V), 1 mM Na2 . . . EDTA, 0.5M NaHP04 (pH 7.2) (1M NaHP04=134 g Na2HP04 . . . 7H20, 4 ml 85% H3P04 per liter), 7% SDS, 0.1-2 mg/ml denatured calf thymus DNA at 65[deg.] C., (4) 50% formamide, 5×SSC, 0.02M Tris-HCl (pH 7.6), I×Denhardfs solution (100×=10 g Ficoll 400, 10 g polyvinylpyrrolidone, 10 g bovine serum albumin (fraction V), water to 500 ml), 10% dextran sulfate, 1% SDS, 0.1-2 mg/ml denatured calf thymus DNA at 42[deg.] C., (5) 5×SSC, 5×Denhardfs solution, 1% SDS, 100 [mu]g/ml denatured calf thymus DNA at 65[deg.] C., or (6) 5×SSC, 5×Denhardfs solution, 50% formamide, 1% SDS, 100 [mu]g/ml denatured calf thymus DNA at 42[deg.] C., with high stringency washes of either (1) 0.3-0.1×SSC, 0.1% SDS at 65[deg.] C., or (2) 1 mM Na2EDTA, 40 mM NaHP04 (pH 7.2), 1% SDS at 65[deg.] C. The above conditions are intended to be used for DNA-DNA hybrids of 50 base pairs or longer. Where the hybrid is believed to be less than 18 base pairs in length, the hybridization and wash temperatures should be 5-10[deg.] C. below that of the calculated Tm of the hybrid, where Tm in <0> C.=(2× the number of A and T bases)+(4× the number of G and C bases). For hybrids believed to be about 18 to about 49 base pairs in length, the Tm in <0> C.=(81.5[deg.] C.+16.6(log ioM)+0.41(% G+Q−0.61 (% formamide)−500/L), where “M” is the molarity of monovalent cations (e.g., Na<+>), and “L” is the length of the hybrid in base pairs.

[0087] Moderate stringency conditions can employ hybridization at either (1) 4×SSC, (10×SSC=3M NaCl, 0.3M Na3-citrate . . . 2H20 (88 g/liter), pH to 7.0 with 1M HCl), 1% SDS (sodium dodecyl sulfate), 0.1-2 mg/ml denatured calf thymus DNA at 65[deg.] C., (2) 4×SSC, 50% formamide, 1% SDS, 0.1-2 mg/ml denatured calf thymus DNA at 42[deg.] C., (3) 1% bovine serum albumin (fraction V), 1 mM Na2 . . . EDTA, 0.5M NaHP04 (pH 7.2) (1M NaHP04=134 g Na2HP04 . . . 7H20, 4 ml 85% H3P04 per liter), 7% SDS, 0.1-2 mg/ml denatured calf thymus DNA at 65[deg.] C., (4) 50% formamide, 5×SSC, 0.02M Tris-HCl (pH 7.6), I×Denhardfs solution (100×=10 g Ficoll 400, 10 g polyvinylpyrrolidone, 10 g bovine serum albumin (fraction V), water to 500 ml), 10% dextran sulfate, 1% SDS, 0.1-2 mg/ml denatured calf thymus DNA at 42[deg.] C., (5) 5×SSC, 5×Denhardfs solution, 1% SDS, 100 [mu]g/ml denatured calf thymus DNA at 65[deg.] C., or (6) 5×SSC, 5×Denhardfs solution, 50%) formamide, 1% SDS, 100 [mu]g/ml denatured calf thymus DNA at 42[deg.] C., with moderate stringency washes of I×SSC, 0.1% SDS at 65[deg.] C. The above conditions are intended to be used for DNA-DNA hybrids of 50 base pairs or longer. Where the hybrid is believed to be less than 18 base pairs in length, the hybridization and wash temperatures should be 5-10[deg.] C. below that of the calculated Tm of the hybrid, where Tm in <0> C.=(2× the number of A and T bases)+(4× the number of G and C bases). For hybrids believed to be about 18 to about 49 base pairs in length, the Tm in <0> C.=(81.5[deg.] C.+16.6(log ioM)+0.41(% G+Q−0.61 (% formamide)−500/L), where “M” is the molarity of monovalent cations (e.g., Na+), and “L” is the length of the hybrid in base pairs.

[0088] Low stringency conditions can employ hybridization at either (1) 4×SSC, (10×SSC=3M NaCl, 0.3M Na3-citrate . . . 2H20 (88 g/liter), pH to 7.0 with 1M HCl), 1% SDS (sodium dodecyl sulfate), 0.1-2 mg/ml denatured calf thymus DNA at 50[deg.] C., (2) 6×SSC, 50% formamide, 1% SDS, 0.1-2 mg/ml denatured calf thymus DNA at 40[deg.] C., (3) 1% bovine serum albumin (fraction V), 1 mM Na2 . . . EDTA, 0.5M NaHP04 (pH 7.2) (1M NaHP04=134 g Na2HP04 . . . 7H20, 4 ml 85% H3P04 per liter), 7% SDS, 0.1-2 mg/ml denatured calf thymus DNA at 50[deg.] C., (4) 50% formamide, 5×SSC, 0.02M Tris-HCl (pH 7.6), IX Denhardfs solution (100×=10 g Ficoll 400, 10 g polyvinylpyrrolidone, 10 g bovine serum albumin (fraction V), water to 500 ml), 10% dextran sulfate, 1% SDS, 0.1-2 mg/ml denatured calf thymus DNA at 40[deg.] C., (5) 5×SSC, 5×Denhardfs solution, 1% SDS, 100 [mu]g/ml denatured calf thymus DNA at 50[deg.] C., or (6) 5×SSC, 5×Denhardfs solution, 50%) formamide, 1%> SDS, 100 [mu]g/ml denatured calf thymus DNA at 40[deg.] C., with low stringency washes of either 2×SSC, 0.1% SDS at 50[deg.] C., or (2) 0.5% bovine serum albumin (fraction V), 1 mM Na2EDTA, 40 mM NaHP04 (pH 7.2), 5% SDS. The above conditions are intended to be used for DNA-DNA hybrids of 50 base pairs or longer. Where the hybrid is believed to be less than 18 base pairs in length, the hybridization and wash temperatures should be 5-10[deg.] C. below that of the calculated Tm of the hybrid, where Tm in <0> C.=(2× the number of A and T bases)+(4× the number of G and C bases). For hybrids believed to be about 18 to about 49 base pairs in length, the Tm in <0> C.=(81.5[deg.] C.+16.6(log i0M)+0.41(% G+Q−0.61 (% formamide)−500/L), where “M” is the molarity of monovalent cations (e.g., Na.+), and “L” is the length of the hybrid in base pairs.

[0089] Immunogenic antigens can be produced recombinantly using a DNA sequence that encodes the antigen, which has been inserted into an expression vector and expressed in an appropriate host cell. DNA sequences encoding antigens can, for example, be identified by screening an appropriate genomic or cDNA expression library with sera obtained from patients infected with M. tuberculosis, HIV, Plasmodium, Leishmania, herpes virus, or hepatitis virus. Such screens can generally be performed using techniques well known to those of ordinary skill in the art. For example, using oligonucleotide primers designed from above DNA sequences, PCR can be employed to isolate a gene from a cDNA or genomic library.

[0090] Alternatively, genomic or cDNA libraries derived from M. tuberculosis, HIV, Plasmodium, Leishmania, herpes virus, or hepatitis virus can be screened directly using peripheral blood mononuclear cells (PBMCs) or T cell lines or clones derived from one or more immune individuals. In general, PBMCs and/or T cells for use in such screens can be prepared as described below. Direct library screens can generally be performed by assaying pools of expressed recombinant proteins for the ability to induce proliferation and/or interferon production in T cells derived from an immune individual.

[0091] The invention also provides vectors, plasmids or viruses containing one or more of the nucleic acid molecules (e.g., having the sequence of SEQ ID NO: 1, 3, 5, 7, 9, 11, 13, 15, 17, 19, 21, 23, 25, 27, 29, 31, 33, 35, 37, 39, 41, 43, 45, 47, or combinations thereof). Suitable vectors for use in eukaryotic and prokaryotic cells are known in the art and are commercially available or readily prepared by a skilled artisan.

### EXEMPLIFICATION

### Example 1

[0092] To generate recombinant S. mitis (r S. mitis), it was first established that strain NCTC 12261 could be transformed and could express foreign genes. The strategy was to express foreign vaccine antigens in the secreted form, which is necessary for bacterial-expressed antigens to be immunogenic. Thus far the genes encoding M. tuberculosis Ag85b and HIV-1 HXBc2 env-His-tag in-frame have been successfully integrated in the genome of S. mitis. These genes were synthetically produced with codons optimized for S. mitis. The genes integrated at the 5′ end of the pullulanase gene (pulA/Smt0163) encoding a signal peptide that allows processing and secretion of the M. tuberculosis and HIV antigens. FIG. 2 illustrates this integration strategy. The signal peptide has an amino-terminal region (N), a hydrophobic core (H), a signal peptidase cleavage site (C), and an accessory Sec transport motif (AST). For stable expression, the M. tuberculosis Antigen 85b and HIV HXBc2 genes or the ermR cassette were integrated via homologous recombination into the pulA gene of S. mitis. PulA was selected as the integration site because the gene has a strong promoter and encodes localization motifs for the gene product; furthermore pulA was not essential for bacterial growth. A DNA fragment containing ermR alone (control) or HIV and ermR or 85b and ermR flanked by 250 bp pulA 5′ and 3′ fragments was constructed and ligated into a suicide vector (pCR2.1) for transformation and integration at the pulA locus (FIG. 3A). S. mitis transformants were selected on erythromycin-containing plates. To test whether a foreign gene was integrated into S. mitis a genomic PCR analysis was performed. PCR analysis showed that the S. mzYw-specific primers A/B generated the expected 250 bp smt0163 PCR product, while the HIV-specific primer C and ermR-specific primer D generated the expected 1 kb product (FIG. 4). In addition, S. mitis pulA specific primer X and 85b-specific primer y generated the expected 250 bp product (FIG. 5, lanes 2-3).

[0093] Next, the expression of Env antigen in S. mitis using the C-terminal His-tag fused to HIV antigen for detection was determined. An expression cassette containing the HIV gene was then transformed into S. mitis for homologous recombination into the pulA gene. S. mitis vaccine vector candidates were grown to mid-log phase in Todd-Hewitt Broth medium with erythromycin. Proteins from cell lysates (̂g) and from concentrated supematants (10 ml) were size fractionated by SDS-PAGE. HIV HXBc2 gpl20 (Env) in the bacterial pellets and as a secreted product in the supematants was detected by Western blotting using horseradish peroxidase conjugated anti-His tag antibody (Penta-His, Qiagen) and a chemiluminescence substrate (Invitrogen). HIV Env linked to the PulA signal peptide was expressed in S. mitis cell lysates of a representative recombinant clone (FIGS. 6A and 6B). Lysates also contained proteins that crossreact with the anti-His-tag antibody (FIG. 6A). In addition, secreted Env was detected in bacterial culture supematants (FIG. 5C). 100 ng of His-tagged M. tuberculosis protein (MT0401) was used as a positive control (FIGS. 6B and 6C, lane 1). The arrow denotes the Env protein band present in the TCA-pecipitated (FIG. 5C, lane 2) and Amicon-concentrated supernatant (FIG. 6C, lane 4), although not in acetone precipitates (FIG. 6C, lane 3). As expected, the HIV Env was not expressed in culture supematants of parent S. mitis cells (FIG. 6C, lanes 5-7). The apparent molecular weight was similar to the expected molecular weight (of approximately 70 kDa), suggesting that Env was not glycosylated in S. mitis.

[0094] Recombinant S. mitis vector is stable after serial passages in vitro. To determine the stability of the integrated Env gene in r S. mitis, four clones were picked at random and grown anaerobically for 24 hours which represents approximately three generations (7.1 hours per generation) in Todd-Hewitt Broth (THB) without erythromycin. Cultures were diluted and grown for another 24 hours for a total of approximately 6 generations. Cultures were diluted again and grown on THB plates without erythromycin. From these plates, between 100 and 150 colonies were picked at random and streaked to THB plates with and without erythromycin. This procedure was repeated to measure the stability of the r S. mitis clones over approximately 30 generations on plates with and without antibiotic. Loss of erythromycin-resistance was taken as an indication of the loss of the Env transgene. The progeny from all four clones were stable, with no loss of erythromycin resistance after ten subcultures or 30 generations of replication without antibiotic (FIG. 7A). In addition, the expression of Env in the same daughter clones was analyzed. Western blot analysis revealed that they secreted the same amount of Env antigen as the original r S. mitis clones; Env production in a representative daughter clone after 30 generations and the original HIVgpl20A clone is shown (FIG. 7B). These results indicate that the resulting r S. mitis is stable, a property that makes it a strong candidate for further preclinical testing in animal models.

[0095] In summary, it was shown that S. mitis can undergo integrative transformation and that the progenies express HIV-1 Env antigen and are highly stable. These results demonstrate that we have successfully developed a stable gene expression system in S. mitis for constructing a r S. mitis vaccine vector.

[0096] r S. mitis elicits HIV-specific immune responses in mice. 6-week old Balb/c mice (4 mice per group) were inoculated i.p. twice (four weeks apart) with 108 cfu live r S. mitis expressing the HIV-1 HXBc2 Env protein (r S. mitis HIVEnv), S. mitis with an intergrated ermr gene only (r S. mitis sham) or saline (Saline). One week following the second inoculation, mice were bled retrorbitally to isolate peripheral blood mononuclear cells (PBMC) which were then stimulated with either 5 [mu]g/ml S. mitis soluble lysate or 5 [mu]g/ml recombinant HXBc2 protein in vitro. Intracellular cytokine staining (ICS) was performed as previously described to assess T cell responses (7). Using the Flowjo software 7.6.3 (Tree Star), IFNy+, TNFa+, IL-2+, CD4+ or CD8+ T cells were determined, and results from a representative mouse from each group is shown (FIGS. 8 and 9). The Student's t test was used to determine cytokine response difference between the groups and a P value <0.5 was considered significant. ICS analysis revealed that that PBMC from mice vaccinated with the r S. mitis HIVEnv had statistically significant higher CD4 T cell responses specific to S. mitis lysate antigens compared to saline injected animals (Saline), producing more IFNy (P<0.003), TNFa (P<0.02) and IL-2 (P<0.002) (FIG. 6). The r S. mitis HIVEnv-vaccine group also generated higher frequency S. mitis specific-CD8 T cells producing IFNy (P<0.02), and TNFa (P<0.004) and IL-2 (P<0.005) compared to the saline group (FIG. 8). With respect to HIV-specific T cell responses, the r S. mitis HIVEnv vaccinees produced marked higher CD4 and CD8 T cell responses specific to the HIV envelope protein compared r S. mitis sham vaccine group. r S. mitis HIVEnv vaccinated mice generated higher frequency HIV Env-specific-CD4 T cell producing IFNy (P<0.005), TNFa (P<0.02 and IL-2 (P<0.01) as well as HIV-specific-CD8 T cells producing IFNy (P<0.009), TNFa (P<0.03) and IL-2 (P<0.002) compared to r S. mitis sham-immunized mice (FIG. 9). Interestingly, r S. mitis was capable of inducing CD 8 T cell responses in mice, which were detected after in vitro stimulation with S. mitis lysate and full-length recombinant protein, which suggests that exogenous S. mitis and HIV Env antigens were processed for crosspriming of CD8 T cells (12,16). This proof of concept immunogenicity study shows that r S. mitis can induce S. mitis- and HIV-specific cellular immunity.

### Example 2

[0097] Two candidate secretion/cell-wall anchored systems will be tested for the expression of the HIV inhibitor, T20. Both the serine-rich GspB-homologue or the pullulanase protein expressed in S. mitis will be tested. Both proteins contain an N-terminal signal peptide (YSIRK type) for secretion and the LPXTG motif for cell-wall surface expression. The signal peptide determinants for secretion of GspB into culture supernatants are the amino-terminal region (N), a hydrophobic core (H), a signal peptidase cleavage site (C), and the accessory Sec transport (AST). Interestingly, attachment of the signal peptide region but exclusion of the LPXTG sequence results in secretion of GspB in culture supernatants. Hence, S. mitis expressing HIV proteins on the cell wall surface will be constructed by flanking the viral protein with the signal peptide and the LPXTG anchor, and S. mzYzs-secreting HIV proteins or T20 inhibitor by attaching the signal peptide to the N-terminus.

[0098] A recombinant S. mitis secreting an HIV-1 inhibitor will be constructed as a microbicide since it was hypothesized that inhibiting HIV entry into oral mucosal target cells will be a viable approach for preventing mother-to-child transmission. Recombinant S. mitis secreting the potent HIV peptide inhibitor, T20, will be constructed. T20 is a 36-amino acid peptide (YTSLIHSLIEESQNQQEK EQELLELDKWASLWNWF (SEQ ID NO: 53)) that acts as a decoy a-helix and prevents HIV-1 infection by disrupting the assembly of the six-helix bundle viral fusion apparatus by mimicking the heptad repeat 2 (HR2) oligomerization domain of the gp41 envelope glycoprotein. T20 is clinically proven to inhibit a diversity of primary isolates of HIV-1 in humans. However, its delivery as a synthetic peptide is associated with high cost and inconvenient dosing regimen, making this drug a reserve in patients with drug resistant HIV. Delivery of this HIV inhibitor in the most cost-effective way will be highly beneficial, and the approach to accomplish this is to deliver the T20 inhibitor as an oral microbicide. Recombinant S. mitis secreting T20 which can be administered orally will be generated. The T20 peptide will be attached to N-terminal signal peptide of S. mitis pullulanase or GspB protein homologue, and an IgA1 protease cleavage site will be added to generate free T20 peptides. Engineered constructs will then be tested for the ability to secrete T20 that will inhibit HIV using the standard neutralization assay (Cayabyab M, Karlsson G B, Etemad-Moghadam B A, Hofmann W, Steenbeke T, Halloran M, Fanton J W, Axthelm M K, Letvin N L, Sodroski J G: Changes in human immunodeficiency virus type 1 envelope glycoproteins responsible for the pathogenicity of a multiply passaged simian-human immunodeficiency virus (SHIV-HXBc2). J Virol 1999, 73:976-984).

### Example 3

[0099] Other commensal bacteria that encode a vaccine antigen can be generated by using the genbank sequences below for the construction of a DNA fragment containing erythromycin resistance cassette that is flanked by 250 bp pulA 5′ and 3′ fragments and ligating it into a suicide vector (pCR2.1) for transformation and integration at the pulA locus.

### Example 4

[0100] A recombinant S. mitis was created to express a fusion construct (SEQ ID NO: 80) of the two homologous glucosylating exotoxins, TcdA and TcdB, produced by the pathogenic bacterium Clostridium difficile. The C. difficile toxin genes or the ermR cassette were integrated via homologous recombination into the pulA gene of S. mitis. A DNA fragment containing ermR alone (control) or C. difficile toxin and ermR flanked by 250 bp pulA 5′ and 3′ fragments was constructed and ligated into a suicide vector (pCR2.1) for transformation and integration at the pulA locus (FIG. 3A). S. mitis transformants were selected on erythromycin-containing plates. To test whether a foreign gene was integrated into S. mitis a Western blot was performed. Anti-TCdA/TCdB mAb recognized the fusion construct in 3 different clones of the recombinant S. mitis construct but not in the wild-type S. mitis (FIG. 18).

[0101] The genome of type strain S. mitis NCTC 12261 was sequenced and genbank numbers can be accessed via pubmed. The Genbank # of S. mitis sequence is as follows: Streptococcus mitis NCTC 12261 contig1, whole genome shotgun sequence 113,379 bp linear DNA Accession:AEDX01000011.1GI:307615963 (SEQ ID NO: 55) Streptococcus mitis NCTC 12261 contig2, whole genome shotgun sequence 24,459 bp linear DNA Accession:AEDX01000017.1GI:307615908 (SEQ ID NO: 56) Streptococcus mitis NCTC 12261 contig3, whole genome shotgun sequence 81,409 bp linear DNA Accession:AEDX01000018.1GI:307615827 (SEQ ID NO: 57) Streptococcus mitis NCTC 12261 contig4, whole genome shotgun sequence 314,111 bp linear DNA Accession:AEDX01000019.1GI:307615569 (SEQ ID NO: 58) Streptococcus mitis NCTC 12261 contig5, whole genome shotgun sequence 100,480 bp linear DNA Accession:AEDX01000020.1GI:307615480 (SEQ ID NO: 59) Streptococcus mitis NCTC 12261 contig6, whole genome shotgun sequence 91,167 bp linear DNA Accession:AEDX01000021.1GI:307615386 (SEQ ID NO: 60) Streptococcus mitis NCTC 12261 contig7, whole genome shotgun sequence 84,457 bp linear DNA Accession:AEDX01000022.1GI:307615313 (SEQ ID NO: 61) Streptococcus mitis NCTC 12261 contig8, whole genome shotgun sequence 111,153 bp linear DNA Accession:AEDX01000023.1GI:307615211 (SEQ ID NO: 62) Streptococcus mitis NCTC 12261 contig9, whole genome shotgun sequence 112,014 bp linear DNA Accession:AEDX01000024.1GI:307615105 (SEQ ID NO: 63) Streptococcus mitis NCTC 12261 contig10, whole genome shotgun sequence 88,437 bp linear DNA Accession:AEDX01000001.1GI:307616687 (SEQ ID NO: 64) Streptococcus mitis NCTC 12261 contig11, whole genome shotgun sequence 93,022 bp linear DNA Accession:AEDX01000002.1GI:307616595 (SEQ ID NO: 65) Streptococcus mitis NCTC 12261 contig12, whole genome shotgun sequence 71,904 bp linear DNA Accession:AEDX01000003.1GI:307616529 (SEQ ID NO: 66) Streptococcus mitis NCTC 12261 contig13, whole genome shotgun sequence 164,416 bp linear DNA Accession:AEDX01000004.1GI:307616373 (SEQ ID NO: 67) Streptococcus mitis NCTC 12261 contig14, whole genome shotgun sequence 75,285 bp linear DNA Accession:AEDX01000005.1GI:307616290 (SEQ ID NO: 68) Streptococcus mitis NCTC 12261 contig15, whole genome shotgun sequence 16,944 bp linear DNA Accession:AEDX01000006.1GI:307616272 (SEQ ID NO: 69) Streptococcus mitis NCTC 12261 contig16, whole genome shotgun sequence 112,411 bp linear DNA Accession:AEDX01000007.1GI:307616176 (SEQ ID NO: 70) Streptococcus mitis NCTC 12261 contig17, whole genome shotgun sequence 22,040 bp linear DNA Accession:AEDX01000008.1GI:307616156 (SEQ ID NO: 71) Streptococcus mitis NCTC 12261 contig18, whole genome shotgun sequence 124,845 bp linear DNA Accession:AEDX01000009.1GI:307616054 (SEQ ID NO: 72) Streptococcus mitis NCTC 12261 contig19, whole genome shotgun sequence 2,436 bp linear DNA Accession:AEDX01000010.1GI:307616052 (SEQ ID NO: 73) Streptococcus mitis NCTC 12261 contig20, whole genome shotgun sequence 8,218 bp linear DNA Accession:AEDX01000012.1GI:307615955 (SEQ ID NO: 74) Streptococcus mitis NCTC 12261 contig21, whole genome shotgun sequence 5,961 bp linear DNA Accession:AEDX01000013.1GI:307615946 (SEQ ID NO: 75) Streptococcus mitis NCTC 12261 contig22, whole genome shotgun sequence 4,520 bp linear DNA Accession:AEDX01000014.1GI:307615941 (SEQ ID NO: 76) Streptococcus mitis NCTC 12261 contig23, whole genome shotgun sequence 3,240 bp linear DNA Accession:AEDX01000015.1GI:307615936 (SEQ ID NO: 77) Streptococcus mitis NCTC 12261 contig24, whole genome shotgun sequence 4,773 bp linear DNA Accession:AEDX01000016.1GI:307615932 (SEQ ID NO: 78) Streptococcus mitis NCTC 12261, whole genome shotgun sequencing project 1,831,081 bp other DNA.

[0102] This entry is the master record for a whole genome shotgun sequencing project and contains no sequence data. Accession:NZ_AEDX00000000.1GI:307708845 Streptococcus mitis NCTC 12261, whole genome shotgun sequencing project 24 rc linear DNA. This entry is the master record for a whole genome shotgun sequencing project and contains no sequence data. Accession:AEDX00000000.1GI:307616765

[0103] The relevant teachings of all the references, patents and/or patent applications cited herein are incorporated herein by reference in their entirety. While this invention has been particularly shown and described with references to preferred embodiments thereof, it will be understood by those skilled in the art that various changes in form and details may be made therein without departing from the scope of the invention encompassed by the appended claims.

The application's sequence listing, which the Patent Office published only in electronic form, follows.

SEQUENCE LISTING (80 sequences)

SEQ ID NO: 1 - DNA, 27 bp, Mycobacterium tuberculosis
gacggctatgtcggcgcgcctgcccac

SEQ ID NO: 2 - protein, 9 aa, Mycobacterium tuberculosis
DGYVGAPAH

SEQ ID NO: 3 - DNA, 1260 bp, Mycobacterium tuberculosis
gtgatcgacggctggacggaagaacagcacgaacccaccgttaggcatgagcgcccagcagctccccaagacgttcggcgggtgatgttgctgggttcggccgaacccagccgggagctggcgatcgcgttgcagggcttgggcgcggaggtgatcgccgtcgacggctatgtcggcgcgcctgcccaccggatagccgaccagtcggtggtggtcaccatgaccgatgctgaagagctgacggcggtgatccggcggctgcaaccggatttcttggtgacggtcaccgccgcggtgtctgtggatgctctcgatgccgtcgagcaagccgacggcgagtgcactgagctggtgccgaacgcccgtgccgtccggtgcacggccgaccgggagggcctgcgccggctggccgccgatcagctcggcctgcccacagccccgttctggttcgtcggatcccttggcgaacttcaagcggtggccgtccatgctgggtttccgttgctggtgagcccggtggcaggggtggctggccagggtagctcggtggtcgccgggcccaacgaggtcgagcccgcctggcagcgcgcggcaggccatcaagtacagccgcagactgggggagtgagccctcgggtgtgcgccgagtcggtggtcgagatcgagtttttggtcaccatgatcgttgtgtgcagtcagggcccgaacgggccgctcatcgagttctgtgcacctatcggtcatcgcgacgccgatgccggtgagttggaatcctggcaaccgcagaagctgagcacggcggcgctggacgcggccaagtcgatcgccgcgcgcatcgtcaaggcgctcgggggacgcggggttttcggcgtcgaattgatgatcaacggcgatgaggtgtatttcgccgatgtcaccgtgtgtcctgccgggagtgcctgggtcaccgtgcgcagccagcggctttcggtgttcgaactgcaggcccgggcgatcctgggtctggcggtggacaccctgatgatctcgccgggtgccgcgcgggtgatcaacccggaccacacggcaggccgggcagcggtcggcgccgcaccacctgccgatgcgctgaccggtgcgctcggtgtgccggaaagcgacgtcgtgatattcggccgcgggcttggggtggcgctggccaccgcacccgaggtggcaatcgcccgcgaacgcgcccgcgaagttgcatctcggctaaatgtgccagactcacgcgagtga

SEQ ID NO: 4 - protein, 419 aa, Mycobacterium tuberculosis
MIDGWTEEQHEPTVRHERPAAPQDVRRVMLLGSAEPSRELAIALQGLGAEVIAVDGYVGAPAHRIADQSVVVTMTDAEELTAVIRRLQPDFLVTVTAAVSVDALDAVEQADGECTELVPNARAVRCTADREGLRRLAADQLGLPTAPFWFVGSLGELQAVAVHAGFPLLVSPVAGVAGQGSSVVAGPNEVEPAWQRAAGHQVQPQTGGVSPRVCAESVVEIEFLVTMIVVCSQGPNGPLIEFCAPIGHRDADAGELESWQPQKLSTAALDAAKSIAARIVKALGGRGVFGVELMINGDEVYFADVTVCPAGSAWVTVRSQRLSVFELQARAILGLAVDTLMISPGAARVINPDHTAGRAAVGAAPPADALTGALGVPESDVVIFGRGLGVALATAPEVAIARERAREVASRLNVPDSRE

SEQ ID NO: 5 - DNA, 39 bp, Mycobacterium bovis
cttgcggcggtggtgggcgtcgtcctggcgcaggtgttg

SEQ ID NO: 6 - protein, 13 aa, Mycobacterium bovis
LAAVVGVVLAQVL

SEQ ID NO: 7 - DNA, 1050 bp, Mycobacterium bovis
atgctcttcgcggccctgcgtgacatgcaatggagaaagcgccgcctggtcatcacgatcatcagcaccgggctgatcttcgggatgacgcttgttttgaccggactcgcgaacggcttccgggtggaggcccggcacaccgtcgattccatgggtgtcgatgtattcgtcgtcagatccggcgctgctggaccttttctgggttcaataccgtttcccgatgttgacctggcccgagtggccgctgaacccggtgtcatggccgcggccccgttgggcagcgtggggacgatcatgaaagaaggcacgtcgacgcgaaacgtcacggtcttcggcgcgcccgagcacggacctggcatgccacgggtctcagagggtcggtcaccgtcgaaaccggacgaagtcgcggcatcgagcacgatgggccgacacctcggtgacactgtcgaggtcggcgcgcgcagattgcgggtcgttggcattgtgccgaattccaccgcgctggccaagatccccaatgtcttcctcacgaccgagggcttacagaaattggcgtacaacgggcagccgaatatcacgtccatcgggatcataggtatgccccgacagctgccggagggttaccagactttcgatcgggtgggcgctgtcaatgatttggtgcgcccattgaaggtcgcagtgaattcgatctcgatcgtggctgttttgctgtggattgtggcggtgctgatcgtcggctcggtggtgtacctttcggctcttgagcggctacgtgacttcgcggtgttcaaggcgattggcacgccaacgcgctcgattatggccgggctcgcattacaggcgctggtcattgcgttgcttgcggcggtggtgggcgtcgtcctggcgcaggtgttggcaccactgtttccgatgattgtcgcggtacccgtcggtgcttacctggcgctaccggtggccgcgatcgtcatcggtctgttcgctagtgttgccggattgaagcgcgtggtgacggtcgatcccgcgcaggcgttcggaggtccctag

SEQ ID NO: 8 - protein, 349 aa, Mycobacterium bovis
MLFAALRDMQWRKRRLVITIISTGLIFGMTLVLTGLANGFRVEARHTVDSMGVDVFVVRSGAAGPFLGSIPFPDVDLARVAAEPGVMAAAPLGSVGTIMKEGTSTRNVTVFGAPEHGPGMPRVSEGRSPSKPDEVAASSTMGRHLGDTVEVGARRLRVVGIVPNSTALAKIPNVFLTTEGLQKLAYNGQPNITSIGIIGMPRQLPEGYQTFDRVGAVNDLVRPLKVAVNSISIVAVLLWIVAVLIVGSVVYLSALERLRDFAVFKAIGTPTRSIMAGLALQALVIALLAAVVGVVLAQVLAPLFPMIVAVPVGAYLALPVAAIVIGLFASVAGLKRVVTVDPAQAFGGP

SEQ ID NO: 9 - DNA, 27 bp, Mycobacterium tuberculosis
cgctccggcgcggccacacccgttcgc

SEQ ID NO: 10 - protein, 9 aa, Mycobacterium tuberculosis
RSGAATPVR

SEQ ID NO: 11 - DNA, 171 bp, Mycobacterium tuberculosis
gtgccggccgctccgtcgacaagagagaaggactgcatgctggttttgcacggcttctggtccaactccggcgggatgcggctgtgggcggaggactccgatctgctggtgaagagcccgagtcaggcgctgcgctccggcgcggccacacccgttcgcggcgcccgctga

SEQ ID NO: 12 - protein, 56 aa, Mycobacterium tuberculosis
MPAAPSTREKDCMLVLHGFWSNSGGMRLWAEDSDLLVKSPSQALRSGAATPVRGAR

SEQ ID NO: 13 - DNA, 21 bp, Mycobacterium tuberculosis
acctgcctcccattcgcacta

SEQ ID NO: 14 - protein, 7 aa, Mycobacterium tuberculosis
TCLPFAL

SEQ ID NO: 15 - DNA, 267 bp, Mycobacterium tuberculosis
atgtccgcgccacccgctcaagcgccggtatgtggcgccttggcggctaggccaaccgcccccggcaacgccagctgcacacgcccagcgaagcgcgattgtcggtacgggtcgcgctgcgaaacctgcctcccattcgcactagcaaaagactgtcgacaagcgagcagtcgacttcaggccgcgaccgaacccgacgagacgacaacaacatctgtcatctcaatgcgctcaccaggatcgctacaatatcagccagctacatga

SEQ ID NO: 16 - protein, 88 aa, Mycobacterium tuberculosis
MSAPPAQAPVCGALAARPTAPGNASCTRPAKRDCRYGSRCETCLPFALAKDCRQASSRLQAATEPDETTTTSVISMRSPGSLQYQPAT

SEQ ID NO: 17 - DNA, 24 bp, Mycobacterium bovis
acgaccatgccgctgttcgccgac

SEQ ID NO: 18 - protein, 8 aa, Mycobacterium bovis
TTMPLFAD

SEQ ID NO: 19 - DNA, 492 bp, Mycobacterium bovis
gtgccagaggtcacccgtgaagaaccggcaatcgatggatggttcaccaccgataaggccggcaacccgcatctgctcggcggcaagtgtccccagtgcggcacgtacgtcttcccaccccgggcggacaattgtccgaatccggcttgcggcagcgacacactagagtcggtcggactgtcgacccgcggaaagctttggagctacaccgaaaaccggtacgccccgccaccgccgtacccggcacccgacccctttgagccgtttgccgtggccgcggtggaactggccgacgagggactgatcgtgctgggcaaagtggtcgatggcacgctggccgccgatctgaaggtcggcatggagatggagctgacgaccatgccgctgttcgccgacgacgacggtgtgcagcgcatcgtctacgcgtggcggatcccatcgcgcgccggcgacgatgcagagcgcagcgatgctgaggagcggcgccgatga

SEQ ID NO: 20 - protein, 163 aa, Mycobacterium bovis
MPEVTREEPAIDGWFTTDKAGNPHLLGGKCPQCGTYVFPPRADNCPNPACGSDTLESVGLSTRGKLWSYTENRYAPPPPYPAPDPFEPFAVAAVELADEGLIVLGKVVDGTLAADLKVGMEMELTTMPLFADDDGVQRIVYAWRIPSRAGDDAERSDAEERRR

SEQ ID NO: 21 - DNA, 141 bp, Mycobacterium bovis
gtgctggtcgcactggccgcgctgggcacccaaccgtggcaggacttcgcagagcaggaaaccgccgggctggccatcatcttggacaacgtcacgcatggcgaatgggccagcacgattctggccgccggtgcggtggtc

SEQ ID NO: 22 - protein, 47 aa, Mycobacterium bovis
VLVALAALGTQPWQDFAEQETAGLAIILDNVTHGEWASTILAAGAVV

SEQ ID NO: 23 - DNA, 1431 bp, Mycobacterium bovis
ttgccgacaacgtcgatgagccttcgagaactgatgctgcggcgccgcccggtgagcggcgccccggtcgcatccggggcatcggggaacctcaagcggagtttcggcaccttccagctgaccatgttcggggttggcgcgacgataggtaccggcatctttttcgtgcttgcccaggcagttccagaggccggcccgggcgtgattgtttcgttcatcatcgccggcatcgccgctgggctcgcggctatctgctacgcggaactggcttccgccgtgccgatttccgggtcggcgtactcctacgcgtacacgacgctgggcgaggcggtcgcgatggtggtggcggcctgcctactgctggaatacggggtagccaccgcagcggtcgcggtcggctggagtggctacgtgaacaagctgctgagtaatctgttcggatttcagatgccgcacgtattgtcggcggcgccgtgggacacccatcccggttgggtgaacctgcccgccgtcatcctgatcgggctatgcgcgctgctgttgattcgaggggccagcgagtcggcgagggtcaacgcgatcatggtgctgatcaagctcggcgtgctgggcatgttcatgatcatcgcgttcagcgcgtacagcgccgaccacctcaaggatttcgtcccattcggcgtcgccggcatcggctccgcggcgggcacgatcttcttctcatacatcggccttgacgcggtgtcgaccgccggcgacgaggtgaaggacccgcagaagaccatgccgcgtgcgctgatcgcagcgctggtggtcgtcaccggtgtctacgtgctggtcgcactggccgcgctgggcacccaaccgtggcaggacttcgcagagcaggaaaccgccgggctggccatcatcttggacaacgtcacgcatggcgaatgggccagcacgattctggccgccggtgcggtggtctcgattttcaccgtcacgctggtcaccatgtacggccagacccggatcctgttcgcgatggggcgcgacgggctgctgccggcgcggttcgcgaaggtgaatccgcgcaccatgacgccggtgcacaacacggtgatcgtcgcgatcttcgcatcgacgctggccgccttcataccgctggatagcttggcggacatggtgtccatcggcacgctcaccgcgttcagcgtggtggctgtgggtgtgatcgttctacgggtgcgcgagcccgacttaccccgagggttcaaggtacccggttaccctgtgacgcctgttctttcggtgctggcctgcgggtatatcctggccagcttgcactggtacacctggctggcgttcagcggatgggtggcggtggcagtgatcttttacctgatgtggggtcggcaccacagtgcgctcaacgaggaagtgccgtga

SEQ ID NO: 24 - protein, 476 aa, Mycobacterium bovis
MPTTSMSLRELMLRRRPVSGAPVASGASGNLKRSFGTFQLTMFGVGATIGTGIFFVLAQAVPEAGPGVIVSFIIAGIAAGLAAICYAELASAVPISGSAYSYAYTTLGEAVAMVVAACLLLEYGVATAAVAVGWSGYVNKLLSNLFGFQMPHVLSAAPWDTHPGWVNLPAVILIGLCALLLIRGASESARVNAIMVLIKLGVLGMFMIIAFSAYSADHLKDFVPFGVAGIGSAAGTIFFSYIGLDAVSTAGDEVKDPQKTMPRALIAALVVVTGVYVLVALAALGTQPWQDFAEQETAGLAIILDNVTHGEWASTILAAGAVVSIFTVTLVTMYGQTRILFAMGRDGLLPARFAKVNPRTMTPVHNTVIVAIFASTLAAFIPLDSLADMVSIGTLTAFSVVAVGVIVLRVREPDLPRGFKVPGYPVTPVLSVLACGYILASLHWYTWLAFSGWVAVAVIFYLMWGRHHSALNEEVP

SEQ ID NO: 25 - DNA, 54 bp, Mycobacterium tuberculosis
tgcgcggtggtgctggccaccatgccgccgctgctttcggcgatcgccaacgca

SEQ ID NO: 26 - protein, 18 aa, Mycobacterium tuberculosis
CAVVLATMPPLLSAIANA

SEQ ID NO: 27 - DNA, 1974 bp, Mycobacterium tuberculosis
atgaccttgaccgcttgtgaagtaactgccgcggaggctcctttcgaccgcgtttcaaagaccattccccacccattgagctggggagccgcgctgtggtcggtagtctccgtgcgctgggccaccgtggcgctgctgctgtttctcgccggactagtggcgcaactgaacggtgctcccgaggccatgtggtggacgctttacctggcctgttatctggccggcggctggggctcggcatgggcgggcgcacaagcgttgcggaacaaggcacttgatgtggatctgctgatgattgccgcggcggtcggagcggtcgcgattgggcagatcttcgacggcgcgctgctgatcgtgatcttcgccacgtccggtgcgctggatgacattgccaccagacacaccgcggaatcggtcaaaggcctgctggacctcgcgccggatcaggcggtggtggtccagggcgacggcagcgaacgggtggtggcggccagcgagctggtggtgggggaccgggtggtggtgcggccgggggaccggatacccgcagacggtgcggtgctgtcgggggctagcgacgtcgaccaacgctcgatcaccggtgaatcgatgccggtggccaaggcccgcggtgacgaggtgttcgccggcaccgtgaacggatcgggtgtattgcatctggtggtcacccgtgacccgagccagaccgtggtagcccgcatcgtcgaactggtcgccgacgcttcggcgacgaaggccaaaacccaactgttcattgagaaaatcgagcaacgctactccctgggcatggtcgcggccacccttgccctcatcgttattccgctgatgttcggcgccgacctgcggccggtgctgctgcgcgccatgaccttcatgatcgtggcatcgccatgcgcggtggtgctggccaccatgccgccgctgctttcggcgatcgccaacgcaggccgtcatggggtgctggtcaaatccgcggtggtcgtcgaacgcctggccgataccagcatcgtcgctttggacaagaccggtacgctgacccgtggcatcccgcgactggcttccgtcgcaccgctggaccccaacgtggtcgatgcccggcgattgttgcaattggcagctgccgcagaacaatccagcgagcacccgcttggccgggcgatcgtcgcggaagctcgtcggcgtggtatcgccataccgcccgccaaggacttccgcgcggtcccgggctgcggggtccacgccctggtgggcaacgatttcgtcgagatcgccagcccgcaaagctaccgcggtgcaccgctagcagagctggcgccgctcctttctgccggcgccactgccgccatcgtcttgttggatggagttgccatcggtgtgctcgggctcaccgatcagcttcgtccggatgccgtggagtccgtcgcggcgatggctgcattgaccgccgcaccaccggtgctgctcacgggtgacaacgggcgagcggcttggcgggtcgctcggaacgccgggatcaccgatgtgcgagccgcattgctgcccgagcagaaggttgaagtcgtgcgcaacctgcaggccggtggtcaccaggtgctgctcgtcggcgacggcgtcaacgacgctcccgccatggccgccgcccgcgccgctgtcgccatgggcgccggcgccgatctgaccctacagaccgcagacggggtgaccatacgggacgaactgcacaccatcccgacgatcatcgggttggcacggcaggcgcgccgggtggtcaccgtcaacctggccatcgcggccaccttcatcgccgtcctggtgctgtgggacctttttgggcagctgccgctgccactgggtgtggtgggtcacgaagggtccactgtgctggtggccctcaacggcatgcggctattgaccaaccggtcgtggcgggccgcggcttcggctgcgcgttag

SEQ ID NO: 28 - protein, 657 aa, Mycobacterium tuberculosis
MTLTACEVTAAEAPFDRVSKTIPHPLSWGAALWSVVSVRWATVALLLFLAGLVAQLNGAPEAMWWTLYLACYLAGGWGSAWAGAQALRNKALDVDLLMIAAAVGAVAIGQIFDGALLIVIFATSGALDDIATRHTAESVKGLLDLAPDQAVVVQGDGSERVVAASELVVGDRVVVRPGDRIPADGAVLSGASDVDQRSITGESMPVAKARGDEVFAGTVNGSGVLHLVVTRDPSQTVVARIVELVADASATKAKTQLFIEKIEQRYSLGMVAATLALIVIPLMFGADLRPVLLRAMTFMIVASPCAVVLATMPPLLSAIANAGRHGVLVKSAVVVERLADTSIVALDKTGTLTRGIPRLASVAPLDPNVVDARRLLQLAAAAEQSSEHPLGRAIVAEARRRGIAIPPAKDFRAVPGCGVHALVGNDFVEIASPQSYRGAPLAELAPLLSAGATAAIVLLDGVAIGVLGLTDQLRPDAVESVAAMAALTAAPPVLLTGDNGRAAWRVARNAGITDVRAALLPEQKVEVVRNLQAGGHQVLLVGDGVNDAPAMAAARAAVAMGAGADLTLQTADGVTIRDELHTIPTIIGLARQARRVVTVNLAIAATFIAVLVLWDLFGQLPLPLGVVGHEGSTVLVALNGMRLLTNRSWRAAASAAR

SEQ ID NO: 29 - DNA, 27 bp, Mycobacterium tuberculosis
atggtgatcatagagctgatgcgccgg

SEQ ID NO: 30 - protein, 9 aa, Mycobacterium tuberculosis
MVIIELMRR

SEQ ID NO: 31 - DNA, 996 bp, Mycobacterium tuberculosis
atggtgatcatagagctgatgcgccgggtggtaggtctcgcacagggagctaccgccgaggtcgccgtctatggcgaccgagatcgtgatctcgcggagcgatggtgcgcgaacaccggaaacaccctggtgcgcgccgacgtggaccagaccggcgtcggcaccctggtggtgcgccgcggccatccgcctgacccggcaagcgtgttgggccccgaccggctacccggggtccggttgtggctgtacaccaacttccactgcaacctgtgctgcgactactgctgcgtctcgtcgtcaccaagcaccccgcatcgcgaactgggggcggagcggatcggccgaatcgtcggtgaagcggcgcgctggggagtgcgcgaactgttcctcaccggcggtgagccgttcctgctgcccgacatcgacacgatcatcgcgacctgtgtgaagcagttgcccaccaccgtcctcaccaacggcatggtgttcaaagggcggggtcggcgcgcgctggaatccctacctagagggctcgccttgcagatcagcctggactcggccaccccggagctgcacgatgcgcaccgcggcgcggggacgtgggtcaaggcagtagctggtatccggttggcgctctcacttggcttccgggtgcgggtggccgcgacggttgccagccccgcacctggcgagctgacggcgtttcacgacttcctcgacgggcttggcatcgcacccggggatcagctggtccggccgatcgcgctggagggcgccgcgtcgcaaggggtggcgctcacccgcgaatcgctggttcccgaggtgaccgtcaccgccgacggcgtgtactggcacccagtggccgccaccgacgagcgcgccctggtcacccgtaccgtcgaacccttgaccccggcgctggacatggtaagccggctattcgccgaacagtggacacgagccgccgaagaggccgcgttgttcccgtgtgcgtag

SEQ ID NO: 32 - protein, 331 aa, Mycobacterium tuberculosis
MVIIELMRRVVGLAQGATAEVAVYGDRDRDLAERWCANTGNTLVRADVDQTGVGTLVVRRGHPPDPASVLGPDRLPGVRLWLYTNFHCNLCCDYCCVSSSPSTPHRELGAERIGRIVGEAARWGVRELFLTGGEPFLLPDIDTIIATCVKQLPTTVLTNGMVFKGRGRRALESLPRGLALQISLDSATPELHDAHRGAGTWVKAVAGIRLALSLGFRVRVAATVASPAPGELTAFHDFLDGLGIAPGDQLVRPIALEGAASQGVALTRESLVPEVTVTADGVYWHPVAATDERALVTRTVEPLTPALDMVSRLFAEQWTRAAEEAALFPCA

SEQ ID NO: 33 - DNA, 57 bp, Mycobacterium tuberculosis
cgtgccaccgcagaccagatcggcacgcagacaacgcaaatcgcggccatcaaagcc

SEQ ID NO: 34 - protein, 19 aa, Mycobacterium tuberculosis
RATADQIGTQTTQIAAIKA

SEQ ID NO: 35 - DNA, 1140 bp, Mycobacterium tuberculosis
atgacgatctccgatgtacccacccagacgctgcccgccgaaggcgaaatcggcctgatagacgtcggctcgctgcaactggaaagcggggcggtgatcgacgatgtctgtatcgccgtgcaacgctggggcaaattgtcgcccgcacgggacaacgtggtggtggtcttgcacgcgctcaccggcgactcgcacatcactggacccgccggacccggccaccccacccccggctggtgggacggggtggccgggccgagtgcgccgattgacaccacccgctggtgcgcggtagctaccaatgtgctcggcggctgccgcggctccaccgggcccagctcgcttgcccgcgacggaaagccttggggctcaagatttccgctgatctcgatacgtgaccaggtgcaggcggacgtcgcggcgctggccgcgctgggcatcaccgaggtcgccgccgtcgtcggcggctccatgggcggcgcccgggccctggaatgggtggtcggctacccggatcgggtccgagccggattgctgctggcggtcggtgcgcgtgccaccgcagaccagatcggcacgcagacaacgcaaatcgcggccatcaaagccgacccggactggcagagcggcgactaccacgagacggggagggcaccagacgccgggctgcgactcgcccgccgcttcgcgcacctcacctaccgcggcgagatcgagctcgacacccggttcgccaaccacaaccagggcaacgaggatccgacggccggcgggcgctacgcggtgcaaagttatctggaacaccaaggagacaaactgttatcccggttcgacgccggcagctacgtgattctcaccgaggcgctcaacagccacgacgtcggccgcggccgcggcggggtctccgcggctctgcgcgcctgcccggtgccggtggtggtgggcggcatcacctccgaccggctctacccgctgcgcctgcagcaggagctggccgacctgctgccgggctgcgccgggctgcgagtcgtcgagtcggtctacggacacgacggcttcctggtggaaaccgaggccgtgggcgaattgatccgccagacactgggattggctgatcgtgaaggcgcgtgtcggcggtga

SEQ ID NO: 36 - protein, 379 aa, Mycobacterium tuberculosis
MTISDVPTQTLPAEGEIGLIDVGSLQLESGAVIDDVCIAVQRWGKLSPARDNVVVVLHALTGDSHITGPAGPGHPTPGWWDGVAGPSAPIDTTRWCAVATNVLGGCRGSTGPSSLARDGKPWGSRFPLISIRDQVQADVAALAALGITEVAAVVGGSMGGARALEWVVGYPDRVRAGLLLAVGARATADQIGTQTTQIAAIKADPDWQSGDYHETGRAPDAGLRLARRFAHLTYRGEIELDTRFANHNQGNEDPTAGGRYAVQSYLEHQGDKLLSRFDAGSYVILTEALNSHDVGRGRGGVSAALRACPVPVVVGGITSDRLYPLRLQQELADLLPGCAGLRVVESVYGHDGFLVETEAVGELIRQTLGLADREGACRR

SEQ ID NO: 37 - DNA, 57 bp, Mycobacterium tuberculosis
cgcaccgccgaggaacgcgccaacgcggttcgcgggcgggccgattcgctgcgccgt

SEQ ID NO: 38 - protein, 19 aa, Mycobacterium tuberculosis
RTAEERANAVRGRADSLRR

SEQ ID NO: 39 - DNA, 3618 bp, Mycobacterium tuberculosis
gtgtacctcaagagtctgacgttgaagggcttcaagtccttcgccgcgccgacgactttacgcttcgagccgggcattacggccgtcgttgggcccaacggctccggcaaatccaatgtggtcgatgccctggcgtgggtgatgggggagcagggggcaaagacgctgcgcggcggcaagatggaagacgtcatcttcgccggcacctcgtcgcgtgcgccgctgggccgcgccgaagtcaccgttagcatcgacaactccgacaacgcactgcctatcgaatacaccgaggtgtcgatcacccgaagaatgtttcgcgacggtgccagcgaatacgaaatcaacggcagcagttgccgtttgatggatgtgcaggagttgctgagcgactccggcatcggccgtgagatgcatgtgattgttgggcaagggaagctcgaggagatcttgcagtcgcggcctgaggatcggcgggcgttcatcgaggaagccgccggtgtgctcaagcatcgcaagcgcaaggaaaaagctctgcgcaaactcgacacgatggcggcgaacctggcccggctcaccgatctgaccaccgagctccggcgtcaactcaaaccgctgggccggcaggccgaggcggcccagcgtgccgcggccatccaagccgatctgcgcgacgcccggctgcgcctggcggccgacgacttggtaagccgcagagccgaacgggaagcggtctttcaggccgaggctgcgatgcgccgcgagcatgacgaggccgccgcccggctggcggtggcatccgaggagctggccgcgcatgagtccgcggtcgccgaactctcgacgcgggccgagtcgatccagcacacttggttcgggctgtctgcgctggccgaacgggtggacgctacggtgcgcatcgccagcgaacgcgcccatcatctcgatatcgagccggtagcggtcagcgacaccgaccccagaaagcccgaggagctagaagccgaggcccagcaggtggccgtcgccgagcaacaactgttagcggagctggacgcggcgcgtgcccgactcgatgctgcccgtgcagagctggccgaccgggagcgccgcgccgccgaggccgaccgggcacacctggcggcggtccgggaggaggcggaccgccgtgagggactggcgcggctggctggccaggtggagaccatgcgggcgcgtgtcgaatcgatcgatgagagcgtggcacggttgtccgagcggatcgaggatgccgcaatgcgcgcccagcagacccgagccgagttcgaaaccgtgcagggccgcatcggtgaactggatcaaggcgaggtcggcctggatgagcaccacgagcgtactgtggccgcgttgcggttggccgacgaacgcgtcgccgagctgcaatccgccgaacgcgccgccgaacgccaggtggcatcgctacgggctcgcatcgatgcgctcgcagtggggctacagcgcaaggacggcgcggcgtggctggcgcacaatcgcagtggcgcagggcttttcggttcgatcgcccaattggtgaaggtacgttccggctatgaagcggcactggccgcggcgctcgggccggcggccgacgcacttgcggtggacggcctgactgccgcgggtagtgccgtcagcgcactcaaacaagccgacggcggtcgcgcggtcctcgtgctgagtgactggccggccccgcaagccccccaatccgcctcgggggagatgctgcctagcggcgcccagtgggccctagacctggtcgagtctccaccgcagttggttggcgcgatgatcgccatgctttcgggtgtcgcggtggtcaacgacctgactgaggcaatgggcctggtcgagattcgtccggagctacgcgcggtcaccgttgacggtgatctggtgggcgccggctgggtcagcggcggatcggaccgcaagctgtccaccttggaggtcacctccgagatcgacaaggccaggagtgagctggccgctgccgaggcgctggcggcgcaattgaatgcggccctggccggtgcgctgaccgagcagtccgcccgccaggacgcggccgagcaagccttggccgcgcttaacgaatccgacacggccatctcggcgatgtacgagcagctgggccgcctcgggcaggaggcccgcgcggcggaagaagagtggaaccggttgctgcagcagcgtacggaacaggaagccgtgcgcacacagactctcgacgacgtcatacaacttgagacccagctgcgtaaggcccaggagacccaacgggtgcaggtggcccaaccgatcgaccgccaggcgatcagtgccgctgccgatcgcgcccgcggtgtcgaagtggaagcccggctggcggtgcgcaccgccgaggaacgcgccaacgcggttcgcgggcgggccgattcgctgcgccgtgcggcagcggcggaacgtgaggcgcgggtgcgggctcagcaagcacgcgccgcaagactgcatgcggccgcggtggccgcagcggtcgccgactgcggacggctgctggccgggcggttgcaccgggcggtggacggggcgtcgcaactgcgcgacgcgtcggccgcgcaacgtcagcagcggttagcggcgatggccgcggtgcgcgacgaggtgaacacgctgagcgcccgagtgggggaactcaccgattcgctgcaccgcgacgagctggctaacgcgcaggcggcgctgcgtatcgagcagcttgagcagatggtgctagagcagttcggaatggcgccggccgacttgatcaccgaatacggtccacatgtggcgctaccaccgaccgagctcgagatggctgagttcgagcaagcccgcgaacgcggcgagcaggtgattgcgcccgcccccatgccgttcgaccgggttacccaggagcgccgggccaaacgcgccgagcgtgcgcttgccgagttgggcagggtcaacccgctggcgctcgaagagtttgctgccttggaggagcgctacaatttcctgtccacccaactcgaggatgtcaaggctgcccgcaaggatctgctgggcgtcgtcgccgatgttgacgcccgcatcctgcaggtgttcaatgacgcgttcgtagacgtggaacgcgaatttcgcggcgtgttcaccgcattgttccccggtggtgaaggacggctgcggctgaccgagcccgacgacatgctcaccaccggcatcgaggtcgaagcccgcccgccgggcaagaagattacccgactgtctttgctctccggtggcgagaaggcgctgaccgcggtggcgatgctggtcgcgatctttcgtgcccgtccatcgccgttctacatcatggacgaggtggaggccgccctcgacgacgtgaacctgcgccgactgctcagcctgttcgaacagctgcgagagcagtcgcagatcatcatcatcacccaccagaagccgacgatggaggtcgcggacgcactgtacggcgtaaccatgcagaacgacggcatcaccgcggtcatctcgcagcgcatgcgcggtcagcaggtggatcagctggttaccaattcctcgtag

SEQ ID NO: 40 - protein, 1205 aa, Mycobacterium tuberculosis
MYLKSLTLKGFKSFAAPTTLRFEPGITAVVGPNGSGKSNVVDALAWVMGEQGAKTLRGGKMEDVIFAGTSSRAPLGRAEVTVSIDNSDNALPIEYTEVSITRRMFRDGASEYEINGSSCRLMDVQELLSDSGIGREMHVIVGQGKLEEILQSRPEDRRAFIEEAAGVLKHRKRKEKALRKLDTMAANLARLTDLTTELRRQLKPLGRQAEAAQRAAAIQADLRDARLRLAADDLVSRRAEREAVFQAEAAMRREHDEAAARLAVASEELAAHESAVAELSTRAESIQHTWFGLSALAERVDATVRIASERAHHLDIEPVAVSDTDPRKPEELEAEAQQVAVAEQQLLAELDAARARLDAARAELADRERRAAEADRAHLAAVREEADRREGLARLAGQVETMRARVESIDESVARLSERIEDAAMRAQQTRAEFETVQGRIGELDQGEVGLDEHHERTVAALRLADERVAELQSAERAAERQVASLRARIDALAVGLQRKDGAAWLAHNRSGAGLFGSIAQLVKVRSGYEAALAAALGPAADALAVDGLTAAGSAVSALKQADGGRAVLVLSDWPAPQAPQSASGEMLPSGAQWALDLVESPPQLVGAMIAMLSGVAVVNDLTEAMGLVEIRPELRAVTVDGDLVGAGWVSGGSDRKLSTLEVTSEIDKARSELAAAEALAAQLNAALAGALTEQSARQDAAEQALAALNESDTAISAMYEQLGRLGQEARAAEEEWNRLLQQRTEQEAVRTQTLDDVIQLETQLRKAQETQRVQVAQPIDRQAISAAADRARGVEVEARLAVRTAEERANAVRGRADSLRRAAAAEREARVRAQQARAARLHAAAVAAAVADCGRLLAGRLHRAVDGASQLRDASAAQRQQRLAAMAAVRDEVNTLSARVGELTDSLHRDELANAQAALRIEQLEQMVLEQFGMAPADLITEYGPHVALPPTELEMAEFEQARERGEQVIAPAPMPFDRVTQERRAKRAERALAELGRVNPLALEEFAALEERYNFLSTQLEDVKAARKDLLGVVADVDARILQVFNDAFVDVEREFRGVFTALFPGGEGRLRLTEPDDMLTTGIEVEARPPGKKITRLSLLSGGEKALTAVAMLVAIFRARPSPFYIMDEVEAALDDVNLRRLLSLFEQLREQSQIIIITHQKPTMEVADALYGVTMQNDGITAVISQRMRGQQVDQLVTNSS

SEQ ID NO: 41 - DNA, 48 bp, Mycobacterium tuberculosis
ctgcacgcgcagaaggcgctgctggtgtggctgctggagcgctcatga

SEQ ID NO: 42 - protein, 16 aa, Mycobacterium tuberculosis
RLHAQKALLVWLLERS

SEQ ID NO: 43 - DNA, 924 bp, Mycobacterium tuberculosis
gtgatcaggcatttcctgcgcgacgacgatctgtccccggccgaacaggccgaggtgctcgagctcgcggccgagctgaagaaagacccggttagccgtcgtcccctgcaagggccgcgcggggtggcggtcatcttcgacaagaactccacccgcacccggttctccttcgagctgggcatcgcgcagctgggcgggcatgccgtcgtcgtcgacagcggcagcacccagctgggccgcgacgaaaccctgcaggacaccgcaaaggtgttgtcccgctacgtcgatgccatcgtctggcgaaccttcggccaagagcggctggacgccatggcgtcggtcgcgacggtgcccgtgatcaacgcgctctccgatgagttccatccgtgtcaggtgttggccgacctgcagaccatcgccgaacgcaagggggcgctgcgcggcctgaggttgtcctacttcggcgacggcgccaacaacatggcccactcgctgctgctcggcggggtcaccgcgggtatccacgtcaccgtcgcggctcccgagggcttcctgcccgacccgtcggtgcgggccgcggccgagcgccgcgcccaggataccggcgcctcggtgactgtgaccgccgacgcccacgcggccgccgccggcgccgacgttctggtcaccgacacctggacgtcgatgggccaggaaaacgacgggttggaccgagtgaagccgtttcggccgtttcagctcaactcgcgacttctggcgctggccgactcggatgccatcgtgttgcattgcctgccggcccatcgcggcgacgagatcaccgacgcggtgatggacgggccggccagcgcggtgtgggacgaggccgaaaaccggctgcacgcgcagaaggcgctgctggtgtggctgctggagcgctcatga

SEQ ID NO: 44 - protein, 307 aa, Mycobacterium tuberculosis
MIRHFLRDDDLSPAEQAEVLELAAELKKDPVSRRPLQGPRGVAVIFDKNSTRTRFSFELGIAQLGGHAVVVDSGSTQLGRDETLQDTAKVLSRYVDAIVWRTFGQERLDAMASVATVPVINALSDEFHPCQVLADLQTIAERKGALRGLRLSYFGDGANNMAHSLLLGGVTAGIHVTVAAPEGFLPDPSVRAAAERRAQDTGASVTVTADAHAAAAGADVLVTDTWTSMGQENDGLDRVKPFRPFQLNSRLLALADSDAIVLHCLPAHRGDEITDAVMDGPASAVWDEAENRLHAQKALLVWLLERS

SEQ ID NO: 45 - DNA, 66 bp, Mycobacterium tuberculosis
cgctggaccgacgaaaccttcggcgacatcggcggcgccggcggcggcgtgagcggacatcgcggg

SEQ ID NO: 46 - protein, 22 aa, Mycobacterium tuberculosis
RWTDETFGDIGGAGGGVSGHRG

SEQ ID NO: 47 - DNA, 765 bp, Mycobacterium tuberculosis
atgagcggcgagacaaccaggctgaccgaaccgcaactacgtgagctggccgcgcgcggagctgccgaactcgacggcgccaccgccaccgacatgttgcgctggaccgacgaaaccttcggcgacatcggcggcgccggcggcggcgtgagcggacatcgcgggtggacaacgtgcaactacgtagttgcttccaacatggctgatgcggtgctggtggatctggccgccaaggtgcgaccgggcgtaccggtcatctttcttgataccggctaccacttcgtcgaaacaatcggcaccagagatgcgatcgagtccgtctatgacgtccgggtgctcaatgtcactccggagcacacagtggccgagcaggacgaactgctgggcaaggacttgttcgcccgcaacccccatgaatgctgccggttgcgcaaggtcgttcccctgggcaagacgctgcgtggctactccgcgtgggtgaccgggctacggcgggtcgatgcaccgacccgggccaatgccccgctggtcagcttcgatgagacgttcaaactagtgaaggtcaacccgctggcggcgtggaccgaccaagatgtgcaggaatacattgccgacaacgacgtgctggttaatccgcttgtgcgggaaggctatccgtcgatcggttgcgctccgtgcacagccaaacccgccgaaggcgccgacccgcgcagcggacgctggcaggggctggccaagaccgaatgcgggttgcacgcctcgtga

SEQ ID NO: 48 - protein, 254 aa, Mycobacterium tuberculosis
MSGETTRLTEPQLRELAARGAAELDGATATDMLRWTDETFGDIGGAGGGVSGHRGWTTCNYVVASNMADAVLVDLAAKVRPGVPVIFLDTGYHFVETIGTRDAIESVYDVRVLNVTPEHTVAEQDELLGKDLFARNPHECCRLRKVVPLGKTLRGYSAWVTGLRRVDAPTRANAPLVSFDETFKLVKVNPLAAWTDQDVQEYIADNDVLVNPLVREGYPSIGCAPCTAKPAEGADPRSGRWQGLAKTECGLHAS

SEQ ID NO: 49 - DNA, 108 bp, Human immunodeficiency virus
tatacatcactcattcactcactcatcgaagaatcacaaaatcagcaggaaaaaaacgaacaagaattattagaattagacaaatgggcatcactttggaattggttt

SEQ ID NO: 50 - protein, 36 aa, Human immunodeficiency virus
YTSLIHSLIEESQNQQEKNEQELLELDKWASLWNWF

SEQ ID NO: 51 - DNA, 1716 bp, Artificial Sequence
  Fusion construct between Streptococcus mitis pulA gene and Human immunodeficiency virus gp120 gene
atggtctacagcatccgttccctcaaaaatggaactggttctgtccttattggagcaagccttattctgcttgccatggctacaccaactatctcagcaaacgaaaatacaccaaccactaacgaacccagcaacagaaatacgacctcccttactcaacctcttactgatgcaacaaacatcgctggcaagaacgaaagcgatttttcttcacccgatagtgcaaacgcttccgcaactacaacccttttttgcgcttcagacgccaaagcttacgatactgaagtccataatgtctgggctacgcatgcctgtgtacctactgaccctaacccacaagaagtcgtactagtaaatgtcaccgagaatttcaatatgtggaagaatgatatggtggagcaaatgcacgaagatatcatcagtttatgggatcaaagcttaaaaccttgtgtcaaactcaccccattatgtgtctctctcaaatgcacagatctaaaaaacgataccaacactaactcatcatctggaagaatgattatggaaaaaggagaaattaaaaattgtagttttaacatcagcacatctattcgcggtaaagtacaaaaagaatacgcatttttttataaacttgatattatcccaatcgacaatgatacaactagttactcacttacgtcttgtaatacctcagtcattacccaagcttgtccaaaagtaagttttgaaccaattccaattcattattgcgcaccagccgggtttgctattttaaaatgtaataataaaaccttcaatggcacaggtccttgtacaaatgtttcaaccgtccaatgtactcacggtattcgtccagtcgtcagcacacaactcttacttaatggtagcttagcagaagaagaggtcgtcatcagatcagttaattttacagacaacgcaaaaacaatcatcgtccagctcaacacttcagtagagattaattgtactagacctaacaacaacaccagaaaacgaatccgaatccaaagagggccaggacgcgcctttgttacgatcggtaaaatcggaaatatgagacaagctcattgcaatattagtagagcaaaatggaacaatacccttaaacaaatcgcttctaagttaagagaacagtttggtaacaataaaaccattatttttaaacaatcatcaggcggggatccagaaatcgtaactcattcatttaattgcggaggagaatttttttattgtaactcaacacaactattcaatagcacttggtttaattctacttggtcaacagaaggttcaaataatacagaaggatcagatacaattacattaccatgtcgtattaagcaaattattaacatgtggcaaaaagttggaaaagctatgtatgctcctcctatttcaggacaaattcgatgctcttcaaatatcacaggacttttattaactagagatggagggaattcaaataacgaaagcgagattttcagaccaggcggaggagatatgagagataactggcgcagtgaattatataaatacaaagttgttaaaatcgaaccattaggagtagccccaaccaaagcaaaacgtcgcgttgtccaatcagaaaagtcagccgtattagaacaattagaatcaatcattaattttgaaaaactcacagaatggaccagctttctagaacatcatcatcatcaccattaa

SEQ ID NO: 52 - protein, 571 aa, Artificial Sequence
  Fusion construct between peptide from Streptococcus mitis pulA gene and peptide from Human immunodeficiency virus gp120 gene
MVYSIRSLKNGTGSVLIGASLILLAMATPTISANENTPTTNEPSNRNTTSLTQPLTDATNIAGKNESDFSSPDSANASATTTLFCASDAKAYDTEVHNVWATHACVPTDPNPQEVVLVNVTENFNMWKNDMVEQMHEDIISLWDQSLKPCVKLTPLCVSLKCTDLKNDTNTNSSSGRMIMEKGEIKNCSFNISTSIRGKVQKEYAFFYKLDIIPIDNDTTSYSLTSCNTSVITQACPKVSFEPIPIHYCAPAGFAILKCNNKTFNGTGPCTNVSTVQCTHGIRPVVSTQLLLNGSLAEEEVVIRSVNFTDNAKTIIVQLNTSVEINCTRPNNNTRKRIRIQRGPGRAFVTIGKIGNMRQAHCNISRAKWNNTLKQIASKLREQFGNNKTIIFKQSSGGDPEIVTHSFNCGGEFFYCNSTQLFNSTWFNSTWSTEGSNNTEGSDTITLPCRIKQIINMWQKVGKAMYAPPISGQIRCSSNITGLLLTRDGGNSNNESEIFRPGGGDMRDNWRSELYKYKVVKIEPLGVAPTKAKRRVVQSEKSAVLEQLESIINFEKLTEWTSFLEHHHHHH

SEQ ID NO: 53 - DNA, 1212 bp, Artificial Sequence
  Fusion construct between Streptococcus mitis pulA gene and Mycobacterium tuberculosis 85b antigen gene
atggtctacagcatccgttccctcaaaaatggaactggttctgtccttattggagcaagccttattctgcttgccatggctacaccaactatctcagcaaacgaaaatacaccaaccactaacgaacccagcaacagaaatacgacctcccttactcaacctcttactgatgcaacaaacatcgctggcaagaacgaaagcgatttttcttcacccgatagtgcaaacgcttccatgacagacgtttctagaaaaattcgtgcttggggaagacgtttaatgattggaaccgctgctgccgttgttttacctggactcgttggattagccggtggcgccgctacagccggagctttttctcgtcctggtttgcctgttgaatatttacaagttccttctccatctatgggtcgcgatatcaaagtacaatttcagtctggtggcaataactctcctgccgtttacttactcgatggtctccgtgcacaagacgattacaatggttgggacattaatactcctgcatttgaatggtactatcagtcaggtctctcaatcgtaatgcctgtcggtggtcaaagtagtttttattctgattggtactcacctgcctgtggaaaagcaggatgtcaaacttacaaatgggaaacattcttaacttcagagcttccacaatggttatccgcaaatcgagctgttaaacctactgggtctgctgctattggtctatctatggctggttcttccgcaatgatcttagctgcttatcatccacaacaatttatttatgctggctcactatctgctcttctagatccttctcaaggtatgggaccaagtttaattggattagctatgggcgacgctggaggttacaaagctgccaatatgtggggaccttcttctgatcctgcctgggaacgaaatgatccaacacaacaaattccaaaattagtagcaaataacacacgtttatgggtttactgtggtaatggcacaccaaatgaacttggaggggctaacattcctgctgaattcttaaaaaattttgttagaagctcaaacttaaaatttcaagacgcatataacgcagctggagggcataatgctgtatttaattttcctccaaacggaacacattcatgggaatattggggcgcacaattaaatgctatgaaaggagatttacaaagttcactaggtgctggttaa

SEQ ID NO: 54 - protein, 366 aa, Artificial Sequence
  Fusion construct between peptide from Streptococcus mitis pulA gene and peptide from Mycobacterium tuberculosis 85b antigen gene
MVYSIRSLKNGTGSVLIGASLILLAMATPTISANENTPTTNEPSNRNTTSLTQPLTDATNIAGKNESDFSSPDSANASNELFSRPGLPVEYLQVPSPSMGRDIKVQFQSGGNNSPAVYLLDGLRAQDDYNGWDINTPAFEWYYQSGLSIVMPVGGQSSFYSDWYSPACGKAGCQTYKWETFLTSELPQWLSANRAVKPTGSAAIGLSMAGSSAMILAAYHPQQFIYAGSLSALLDPSQGMGPSLIGLAMGDAGGYKAANMWGPSSDPAWERNDPTQQIPKLVANNTRLWVYCGNGTPNELGGANIPAEFLKNFVRSSNLKFQDAYNAAGGHNAVFNFPPNGTHSWEYWGAQLNAMKGDLQSSLGAG

SEQ ID NO: 55 - DNA, 113379 bp, Streptococcus mitis NCTC 12261 contig1
ttttatctcacaaggttatccactatttttttcaaaaaaaagcttcataaatcaatagtttctgattttatccccaacctgtggataaaacttgataacattgtggattatttttcacagcttgtggaaaattcttgctatctatggtaaaataaatctagcattaaacttttaaatagtaaaggaggagaaaggattgaaagaaaaacaattttggaatcgtatattagaatttgcacaagaaagactaactcgttccatgtatgatttctatgctattcaagctgaactcattaaggtagaagaaaatgttgccactatatttttaccacgatctgaaatggaaatggtctggaaaaaacaactaaaagatatcattgtagtagctggttttgagatttatgatgctgaaataactccccactatatttttaccaagcctcaagatacgattatcccacaagttgaagaagctccaaattcaactctctatgactatagtccaaagttagcatctattccttattcggatactggattaaaagaaaagtatacctttgataattttatccaaggggatggaaatgtttgggcagtatcagccgccctggctgtctctgaagatttggccttgacctataatcctctttttatctatggaggacctgggcttggtaagactcacttactcaatgccattgggaatgagattttgaaaaatattcctgatgcgcgtgtgaagtacattcctgctgaaagctttataaacgactttcttgaacatctgagactgggtgaaatggataagttcaaaaaaacctaccgtagcctcgatctcttgttaattgatgatattcaatcgctgagtggaaaaaaagttgcaactcaggaagaatttttcaatactttcaatgttctccataacaatcaaaaacaaattgttctgactagtgatcgtagccctaaacacttagagggccttgaagaaagacttgtcacgcgctttagctggggcttgacgcaaaatatcacaccacctgactttgagacacgtattgccattttacaaagcaaaacagagaatttagactaccatttccaaagtgataccctagaatacctagctggtcaatttgattcaaacgtccgagaacttgaaggagcaataaacgacatcactttaatcgcccgagtgaagaagattaaggatatcactatcgatatcgctgcagaggctattagggcacgcaaacaagatgttagccaaatgctcgtcatcccaattgataaaatccaaaatgaagttggtaacttttatggtgtcagcgtcaaagaaatgaagggaagcagacgccttcaaaatattgtgttagcccgtcaagtagccatgtatttatctagagaactaacagataatagtcttccaaaaattgggaaggaatttggtggtaaagatcacacaacagtcattcatgcccatgccaaaattaaatctttgattgatgaagacgataatttacgtttagaaattgaatcaatcaaaaagaaaatcaaataacttgtggataacttttactttattatcttttttatccacattttttaaacaagcccaaaaacttgatatgacttgtttaaagtctgttttccacagatttcacagactctattattactattatccttctaatactaaaaataaataaaggagaatccatgattcatttttcaattaataaaaatttatttctacaagccttaaatactactaagagagctattagctctaaaaatgccattcctattttatcaaccgtcaaaattgacgtaaccaatgaaggtgttactttaattggttcaaatggtcaaatttcaattgaaaattttatttctcaaaaaaatgaagatgctggtttgttaattacttctttaggttcgatccttcttgaagcttctttcttcatcaatgtggtatctagtctacctgatgtgactcttgattttaaagaaattgaacaaaaccaaattgttttaactagtggcaaatcagaaattaccctaaaaggaaaagatagcgagcaatatccacgaatccaagaaatttcagcaagcactcctttggttcttgaaacaaaattacttaagaaaattatcaatgaaacagcttttgctgcaagtacacaagaaagtcgtccaattttaacaggtgttcattttgtattgagccaacacaaagagttaaaaacagttgcaacagactctcatcgtctaagccagaaaaaattgactcttgaaaaaaatagtgatgattttgatgtcgtgattcctagccgttctctacgcgaattttcagcagtatttacagatgatattgaaactgtagagattttctttgccaacaatcaaatcctctttagaagcgaaaatattagcttctatactcgtttgttagaaggtaactatcctgatacagatcgcttgattccgacagactttaacactactattacttttgatgtggtaaacttacgtcagtcaatggagcgtgctcgccttttatcaagtgcgactcaaaatggtactgtgaagcttgaaattaaaggtggtattgttagcgcccatgttcattctccagaagttggtaaagtaaacgaagaaatcgatactgatcaggtgactggtgaagatttgactattagtttcaacccaacttacttgattgattctcttaaggctttaaatagcgaaaaggtgaccattagctttatctcagctgttcgtccatttactcttgtgccagcagacactgatgaagacttcatgcagctcattacaccagttcgtacaaattaagtgaaagaggttgagcctggctcgcctcttttatgatataatctaaaaagagaaggagagtagtatgtatcaagttggaaattttgttgaaatgaaaaaaccacatgcttgcaccatcaagtcaacaggtaaaaaggccaatcgttgggaaattacacgtgtaggagcagatatcaaaattaaatgtagcaattgtgaccatgttgtcatgatggggcgctatgattttgatcgaaaaatgaataaaattattgactgaaacccctcagttagagggttagcaagttttccctttttgtgttataatattagggattgaaatgaaaacggagaatgagaaaatatggctttaacagcaggtatcgttggtttgccaaacgttggtaaatcaacactatttaatgcaattacaaaagcaggagcagaggctgcaaactatccatttgcgacgattgatccaaacgttggaatggttgaggttccagatgaacgcctacaaaaattgactgaaatgatcactcctaaaaagacagttccaacaacatttgaatttacagatatcgcaggaattgtaaaaggagcttcaaaaggagaagggctagggaataaattcttggctaatatccgtgaagtagacgcgattgttcacgtagttcgtgcttttgatgatgaaaatgtgatgcgcgagcaaggacgtgaagatgcttttgtggatccacttgcagatattgatactattaacctggagttgattcttgctgacttagaatcagttaataagcgttatgcgcgtgtagaaaagatggcacgtacgcaaaaagataaagaatcagtagctgagtttaatgttcttcaaaagattaaaccagtcctagaagatggaaaatcagctcgaactattgaatttacagatgaagaacaaaaagttgtcaaaggtctcttccttttgacgactaaaccagtgctctatgttgccaatgtggatgaggatgttgtttcagaacctgactctatcgactatgttaaacaaattcgtgaattcgcagcgacagaaaatgctgaagtagtcgttatttctgcgcgtgctgaggaagaaatttctgagttagacgaagaagataagcaagagtttcttgaagcacttggtttgacagagtcaggcgttgacaagttgactcgtgcagcttaccacttacttggattgggaacttacttcacagctggtgaaaaagaagttcgcgcttggacctttaaacgtggtatgaaggctcctcaagcagctggtattatccactcagactttgaaaaaggatttattcgtgcagtaactatgtcatatgaggatctagtgaaatacggatctgaaaaggctgtaaaagaagctgggcgcttgcgtgaagaaggaaaagaatatatcgttcaagatggcgatatcatggaattccgctttaatgtctaataatatttaacaaatagtgtcaattaggttggaaaaaaattccaacccttttggcttttgaaaggaaaaataaatgaccaaattacttgtaggattaggaaatccaggagataaatattttgagaccaaacacaatgttggatttatgttgattgaccaactagcgaagaaacagaatgtcacttttacacacgataagatatttcaagctgacctagcatcctttttcctaaatggagaaaaaatttatcttgtcaaaccaacgacatttatgaatgaaagtggaaaagcggttcatgctttattgacttattatggtttggatattgaagatttactcatcatttacgatgaccttgacatggaagttgggaaaattcgtttaagagcaaaaggttcagcaggtggtcataatggtatcaagtctattattcaacatattggaacccaaacctttaatcgtgttaaaattggaatcggaagacctaaaaatggcatgtcagttgttcaccatgttttgagtacttttgacaaggatgattatattggtattttacagtctattgacaaagttgacgattctgtaaactactatttacaagagaaaaactttgaaaaaacgatgcagaggtataacggataaatggtgaccttattagatttattctcagaaaatgatcagataaaaaaatggcatcaaaatctgacagataagaaaagacaattaatcttaggcttgtcaacttctacaaaaactttagcaattgctagtagtttgagacaggaagataagattgtgttattgacgtcaacttatggagaagccgaaggacttgttagtgatcttatatctatcttgggtgaggaacttgtctatccatttttggtagatgactcccctatggtcgagtttttgatgtcttcacaagaaaaaatcatttcactggttgaagccttgcgttttttgactgattcatctaagaaagggattttagtttgtaatatcgcagcaagtcgattgattttaccgtctcccaatgcatttaaagatagtattgtaaaaataacagttggtgaagaatatgaccaacacgcacttatccatcagttaaaagagataggctatcgaaaagttacacaagtacaaactcaaggcgaatttagtctgcgaggagatattttagatatttttgaaatatcccagttggaaccttaccgaattgagttttttggtgatgaagtcgatggtattaggtcatttgaagtcgaaacacaattatcgaaagaaaatcagacagaactcattatctttccagctagtgatatgcttttgagggaaaaggattatcaacgaggacaatcagctttagaaaaacaaatttcaaaaacgttatcacctattttaaaatcatacttagaagaaattctttcaagttttcatcaaaaacaaatgcatttagattctaggaagtttttatctttgtgttatgagaaatcatggactgtatttgattatattgaaaaagatacaccaatattctttgatgattaccagaaattgatgaatcagtatgaagcatttgaaagagaattagcgcaatactttacagaagatttacagaatggtaaatcattttctgagatgcagtattttgcagatacagagcaaaactataaaaaacaaagtccagttacctttttctccaatctgcaaaagggcttaggaaatctcaagtttgatcacatttatcaatttaatcaataccccatgcaagagtttttcaatcagttttcttttctaaaagaagaaattgaacgatacaaaaaaatggactacactattattctgcaatctagcaattcaatgggaagtaaaacattggaggatgttttagaggaataccagattaaattggactctagagataagtcaagtatctgtaaagaatctgtaaacttaatcgagggcaatctcagacatggttttcattttgtagatgaaaaaattctggtgattactgaacatgagatttttcaaaagaaattaaaacgtcgttttcgaagacaacatgtttcaaatgcagagagattaaaagattataatgaacttgagaaaggggactacgttgttcaccatatccatggaattggtcaatatctagggattgaaacaattgaaatcaaagggatacaccgcgattatgtcagtgtccaataccaaaatggtgatcaaatctctatcccagtagaacagattcatctactttccaaatacgtttcaagtgacgggaaagctcctaaactcaataagttaaatgatggtcattttaaaaaggctaagcaaaaagttaagaatcaggtagaggatatagctgacgatttaatcaaactctattctgagcgtagtcagttgaagggctttgctttctcagctgatgatgaagagcaagatgcttttgatgatgcttttccttatgttgaaacggatgatcaacttcgtagtatcgaggaaatcaagagagatatgcaagattctcagccaatggataggctattggttggggatgttggttttggaaagactgaagttgcaatgcgtgcagcctttaaggcagtcaatgataacaaacaggtggtcgttctagttccgacgacggttttagcgcaacagcactatacgaattttaaggaacgattccaaaattttgcagttaatattgatgtgttgagtcgctttagaagtaaaaaagagcagactgaaacacttgaaaaattgaaaaacggtcaagttgatattttgattggaacccatcgtgttttgtcaaaagatgttgtgtttgctgatttgggcttgatgattattgatgaggaacaacgatttggtgtcaagcataaggaaaccttgaaagaactgaaaaaacaagtagatgtcctgaccttgacagcaacgccaattcctcgtacccttcacatgtctatgctgggaatccgagatttgtctgttattgaaactcctccaactaatcgctatcctgttcaaacctatgtattggagaagaatgatagtgtcattcgtgattctgtcttgcgtgaaatggagcgtggaggtcaagtttactatctttacaataaagttgacacaattgatcagaaggtttcaaaattacaggagttgattccagaggcttcaattgggtatgttcatgggcaaatgagtgagattcagttagaaaatactctactagatttcattgaaggtcagtatgatatcttggtgacaactaccattattgagacaggggtggacattccaaatgccaatactttatttattgaaaatgcggaccatatgggcttgtcaaccttgtatcagttaagaggaagagttggtcgtagtaatcgtattgcttatgcttatctcatgtatcgtccggaaaaatcaatcagtgaagtatctgaaaagagattagaagcaatcaaaggatttacagaattgggctccggatttaagattgcaatgcgagatctttcgattcgcggagcaggaaatcttttagggaaatcccagtctggtttcattgattctgttggttttgaattgtattcgcaattattggaggaagctattgctaaacgacatggtaatgggaacacaagaaccaaagggaatgctgagttgattttacaaattgatgcctatcttcctgatacctatatttctgatcaacgacataagattgaaatttacaagaaaattcgtcaaattgacaaccgtgccaactatgaagagttacaagaagagttgatggaccgctttggagagtacccagacgtggtagcctatcttttagagattggtttggttaagtcttatcttgacaaggtctttgttcaacgtgtggaaagaaaagataataagattacagtacaatttgaaaaagtcactcagcgattgtttttggctcaagattattttaaatctttatctgcaacgaatttaaaagcagccataactgagaataagggattaatggaagttgtatttgacatccgaaacaagaaggactatgaaattttagaaggtctgctcatttttggagaaagtttattagagataaaagaatcaaaggaagcaatttccctttaacatttttcttctataaaagggataaaaatggtacaataataatttgaggtaataaaaatgagattagacaaatatttaaaagtatcaagaattatcaagcgtcgtacagtcgcaaaagaagtagcagataaaggtagaatcaaggtaaatggaatcttggcaaaaagttcaacggatttgaaagttaatgaccaagttgaaattcgatttggaaataagttgctacttgtaaaagtactggagatgaaagatagtacaaaaaaagaagatgcagcaggcatgtatgaaattatcagtgaaacacgggtagaagaaaatgtctaaaaatatcgtacaattgaataattcttttattcaaaatgaacaccaacgtcgtcgctatctgatgaaagaacgacaaaaacgtaatcgtttcatgggttgggttcttattttgatgattttattgttcattttaccaacttataatcttgctcaaagttatcaccaattactccaaagacgtcaacagttatcagacttgcaaactcagtatcaaaccttaagtgaggaaaaggagaaagagacagcttttgctacaaagttgaaagatgaagattacgctgctaaatacatgcgtgcaaaatattattattctaagaatcgggaagctgtttatacgattcctgacttgctcccaaggtgataaaatggaaaatttattagatgtaatagagcaatttttgagtctatcggatgaaaaactagaagagttggctgataaaaatcaattattgcgtttacaagaagaaaaggaaaggaagaatgcgtaagttcttaattattttgttgctaccgagttttttgactatttcaaaagtcgttagcacagaaaaagaagtcgtctatacttcgaaagaaatttattacctttcacaatctgactttggtatttattttagagaaaaattaagttctcccatggtttatggagaggttcctgtttatgcgaatgaagatttagtagtggaatctggaaaattgactccccaaacaagttttcaaataaccgagtggcacttaaataaacaaggaattccggtatttaagctatcaaatcatcaatttatagctgcggacaaacgatttttatatgatcaatcagaggtaactccaacaataaaaaaagtatggttagaatctgattttaaactgtacaatagtccttatgacttaaaagaagtgaaatcatccttatcagcttattcgcaagtatcaattgataagaccatgtttgtagaaggaagagaatttctacatattgatcaggctggatgggtagctaaagaatcaacttctgaagaagataatcggatgagtaaagtccaagaaatgttatcggaaaaatatcagaaggattcattttctatttatgttaagcaactgactactggaaaagaagctggtatcaatcaagatgaaaagatgtatgcggctagtgttttgaaactcccttatctttattatacgcaaagaaaaaataaatgaaggtctttatcagttagatacgactgtaaaatacatatctgcagtcaatgattttcctggttcctataaaccagaaggaagtggtagtcttcctaaaaaagaggataataaagagtattctctaaaggatttaattacgaaagtatcaaaagaatctgataatgtagctcataatctattgggatattacatttcaaaccaatctgatgccacattcaaatccaagatgtctgctattatgggagatgattgggattccaaagaaaaattgatttcttctaagatggctgggaaggttatggaggcaatttataatcaaaatggatttgtattggagtctttgactaaaacagattttgataatgagagaattgccaaaggtgtttctgttaaagtagctcataaaattggagatgcggatgaatttaagcatgatacaggtgttgtctatgcagattctccatttattctttctattttcactaaaaattctgattatgatacgatttctaagatagccaaagatgtttatgaggttctaaaatgagggaacaagattttttaaatcattttctcaagaagggatatttcaaaaagcatgctaaggtggttctagctctttctggtggattagattctatgtttctatttaaggtgttatctacgtatcaaaaagagttagaaattgaattgattctagctcatgtgaatcataagcagagagtagaatcagattgggaagaacaggaattaaggaagttagctgctgaagcagagcttcctatttatatcagcaatttttcaggagaattttcagaagcgcgtgcacgaaattttcgttatgatttttttcaagaggtcatgaaaaagacaggtgcgacagccttagtcactgcccaccatgctgatgatcaggtggaaacgattttgatgcgcttgattcgaggaactcgtttgcgctatctatcaggaattaaggagaagcaagtagtcggagagatagaaatcattcgtcccttcttgcattttcagaaaaaagacttcctatcaatttttcattttgaagatacatcaaataaggaaaatcattattttcgcaatcgtattcgaaactcatacttaccagaattagaaaaagaaaatcctagatttagagatgcaatcttaagtatcggtaatgaaattttagattatgacttagctatagctgaattatcaaaaaatattgatgtagaaaatttatatcagctattgtcttactctgagtcgacacaaagagttttacttcaaacttatctgaatcattttccagatttgaatcttacaaaagctcagtttgaagaagttagacaaattttaaaaactaaaagccagtatcgtcatccgcttaaaaatggttatgaattagtaaaagagtatcaacagtttcggatttgtaaaatcagtcctcagtctgatgaaaaggaagatgaacttgtgttacactatcaaaatcaggtatcttatcaaggatatttattttcctttggacttcctttagatggtgaattaattcagcaggtacctgtttcacgggaaacatcagtacacattcgtcatcggaaaacaggagattttttgattcaaaatgggcatagaaaaaaactcagacgtctatttattgatttgaaaatccctatggaaaagcgaaaatcagctctgattattgagcaatttggtgaaattgtctcaattttgggaattgcgaccagtaatttgagtaaaaacacgaaaaatgatataatgaacactgtactttatatagaaaaaatagataggtaaaaaaatgttagaaaacgatattaaaaaaatcctcgtttcacacgatgaaattacagaagctgctaaaaaattaggtgctcaattaactaaagactatgcaggaaaaaatccaatcttagttgggattttaaaaggatctattccttttatggctgaattagtcaaacatatcgacacacatattgaaatggacttcatgatggtttctagctatcatggtggaacagcaagtagcggtgtcatcaatatcaagcaagatgtaactcaagacatcaaaggaagacatgttttatttgtagaagatatcattgatacaggtcaaactttgaagaatttgcgagatatgtttattgcaagagaagcagcttctgttcacattgcaaccttgttggataaaccagaaggacgtgttgtagaaattgaggctgactatacctgctttactattccaaatgagtttgtagtaggttatggtttagactacaaagaaaattatcgtaaccttccttatgttggagtattgaaagaagaagtatattcaaattagaaagaacaatttttaatgaaaaaacaaaataatggtttaattaaaaatccttttctatggttattacttatttttttcctagttacagcttaccagtatttcagtacaggtagtgttgcagggaaaagtgagcaaattaattatacagaattggtaaaagaaattaccgatgacaatgtaaaagaattaacctaccaaccaaatggcagtgttatcgagatttcgggtgtctataaaaatcctaaaacaagtaaagaagaaacaggtatccagttcttttctccttctgctacaacagtagagaaattttcaagtattattcttccttcagatactacagtatcagaattgcaaaagcttgcttctgaccataaagcggaagtaactattaagcatgaaagttcaagtggtatgtggattaatattcttgtatccattgtgccattcggtatcctcttcttcttcctcttctcgatgatgggaaatatgggaggaaataatagccgtaacccgatgagttttggacgtagtaaggctaaagctgcaaataaagaagatattaaagtaagattttcagatgtggctggagctgaggaagaaaaacaagaactagttgaagttgttgaatttctaaaagatccaaaacgatttacaaaacttggagctcgtattccagcaggtgtccttctggagggacctccgggaacaggtaaaactttgcttgctaaggcagtcgccggagaagcaggtgttccattctttagtatttcaggttctgactttgtagaaatgtttgtcggagttggagctagtcgtgttcgttctctttttgaagatgccaaaaaagcagcaccagctattatctttatcgatgaaattgatgctgttggacgtcaacgtggagttggtcttggtggaggaaatgacgaacgtgaacaaaccttgaaccaacttttgattgagatggatggttttgagggaaatgaagggattatcgttatcgctgcgacaaaccgttcagatgtacttgatcctgcccttttacgtccaggacgttttgatagaaaagtattggttggccgtcctgatgttaaaggtcgcgaagcaatcttgaaagttcatgctaagaacaagcctttagcggaaaatgttgatttgaaattagttgcccaacaaactccaggttttgttggtgctgatttagagaatgtattgaatgaagctgctttagtcgctgctcgtcgcaataaatcgataattgatgcttcagatattgatgaagcagaagatagagttattgctggaccttctaagaaagataagacagtttcacaaaaagaacgtgaattggttgcctatcatgaggcaggacataccattgttggtctagtcttgtcgaatgctcgtgttgttcataaagttactatcgtaccacgcggccgtgcaggtggttatatgattgcacttcctaaagaggatcaaatgcttctatctaaagaagatatgaaagagcaattggctggtttaatgggtggacgtgtagccgaagaaattatctttaatgtccaaactacaggagcttcaaatgactttgaacaggcgacacaaatggcgcgtgcaatggttacagagtacggtatgagtgaaaaactaggtccagttcaatatgagggcaatcatgctatgtttggtgcacagagccctcaaaaatcaatctcagaacaaacagcttatgaaattgacgaagaggttcgttcattattgaatgaagcacgaaataaagctgctgaaattattcagtcaaatcgtgaaactcacaagttgattgcagaagcattattgaaatacgaaacattggatagtacacaaattaaagctctttacgaaacaggaaagatgcctgaaaccgtagaagaggaatctcatgcattatcttatgatgaagtaaagtcaaaaatgaatgatgaaatataaccctgagagaggcgtgacctctcttttttgtgcagttgagacggtaaaggagacagaataggcgaaatggtcccaattaagttcttgatttgttagactgtatctagaaaggggaacgttatgtttaaagaattatatgaagaagtccaggggattgtatataagtgtagaaatgaatatcatctccatttatgggagctatcagattgggaccaagagggaatgatttgcttacatgaattgattagtagagaagaaggaatagtagaagatatcccacgcttacgtaaatacttcaaaactaaattccgtaatcggatcctagactatatccgtaagcaggaaagccagaagcgtagatatgataaagaaccctatgaagaagtaggtgagattagtcatcgtatcagtgagggaggtatgtggctagatgagtattatctctttcatgagacactaagagattatagaaacaaacaaagtaaagacaaacaagaagagttagaacgcgtcttaagacatgaacgcttccgagggcgtcaaagagtattgagagacttacgtattgtgtttaaggagtttgatatccgtactcattagggagtcatacaaaaaaacataaaaagtttaaaaaagtagttgacaagtcagaaaaagtctgtataatagtaagagttgaaaataacagctcaggtccgttggtcaaggggttaagacaccgccttttcacggcggtaacacgggttcgaatcccgtacggactatggtatgttgcggttgaggcacttgatgaaaaaagattaaaaaagtttcaaaaaagtgttgacaagcgaaagcgactgtgatatactaatatagttgtcacttgagagaagcaagtgacaaagacctttgaaaactgaacaagacgaaccaatgtgcagggcactataactaaggttatagtactgaacaatgaaaaaacaataaatctgtcagtgacagaaatgagtgagaactcaaacttttaatgagagtttgatcctggctcaggacgaacgctggcggcgtgcctaatacatgcaagtagaacgctgaaggaggagcttgcttctccggatgagttgcgaacgggtgagtaacgcgtaggtaacctgcctggtagcgggggataactattggaaacgatagctaataccgcataagagtagatgttgcatgacatttgcttaaaaggtgcaattgcatcactaccagatggacctgcgttgtattagctagttggtggggtaacggctcaccaaggcgacgatacatagccgacctgagagggtgatcggccacactgggactgagacacggcccagactcctacgggaggcagcagtagggaatcttcggcaatggacggaagtctgaccgagcaacgccgcgtgagtgaagaaggttttcggatcgtaaagctctgttgtaagagaagaacgagtgtgagagtggaaagttcacactgtgacggtatcttaccagaaagggacggctaactacgtgccagcagccgcggtaatacgtaggtcccgagcgttgtccggatttattgggcgtaaagcgagcgcaggcggttagataagtctgaagttaaaggctgtggcttaaccatagtacgctttggaaactgtttaacttgagtgcaagaggggagagtggaattccatgtgtagcggtgaaatgcgtagatatatggaggaacaccggtggcgaaagcggctctctggcttgtaactgacgctgaggctcgaaagcgtggggagcaaacaggattagataccctggtagtccacgccgtaaacgatgagtgctaggtgttagaccctttccggggtttagtgccgcagctaacgcattaagcactccgcctggggagtacgaccgcaaggttgaaactcaaaggaattgacgggggcccgcacaagcggtggagcatgtggtttaattcgaagcaacgcgaagaaccttaccaggtcttgacatccctctgaccgctctagagatagagttttccttcgggacagaggtgacaggtggtgcatggttgtcgtcagctcgtgtcgtgagatgttgggttaagtcccgcaacgagcgcaacccctattgttagttgccatcatttagttgggcactctagcgagactgccggtaataaaccggaggaaggtggggatgacgtcaaatcatcatgccccttatgacctgggctacacacgtgctacaatggctggtacaacgagtcgcaagccggtgacggcaagctaatctcttaaagccagtctcagttcggattgtaggctgcaactcgcctacatgaagtcggaatcgctagtaatcgcggatcagcacgccgcggtgaatacgttcccgggccttgtacacaccgcccgtcacaccacgagagtttgtaacacccgaagtcggtgaggtaaccttttaggagccagccgcctaaggtgggatagatgattggggtgaagtcgtaacaaggtagccgtatcggaaggtgcggctggatcacctcctttctaaggataaggaactgcgcattggtcttgtttagtcttgagaggtcttgtggggccttagctcagctgggagagcgcctgctttgcacgcaggaggtcagcggttcgatcccgctaggctccattggtgagagatcaccaagtaatgcacattgaaaattgaatatctatatcaaatagtaacaagaaaataaaccgaaaacgctgtagtattaataagagtttatgactgaaaggtcaaaaaataaggttaagttaataagggcgcacggtggatgccttggcactaggagccgaagaaggacgtgacaaacgacgatatgccttgggtagctgtaagtaagcgatgatccagggatttccgaatgggggaacccaacaggtactacctgttacccacatctgttaaggatgtgaggaggaagacgcagtgaactgaaacatctaagtagctgcaggaagagaaagcaaaagcgattgccttagtagcggcgagcgaaacggcaggagggcaaaccgaagagtttactcttcggggttgtaggactgcaatgtggactcaaagattatagaagaatgatttgggaagatcagccaaagagagtaatagcctcgtatttaaaatagtctttgtacctagcagtatcctgagtacggcgggacacgtgaaatcccgtcggaatctgggaggaccatctcccaaccctaaatactccctagtgaccgatagtgaaccagtaccgtgagggaaaggtgaaaagcaccccgggaggggagtgaaatagaacctgaaaccgtgtgcctacaacaagttcgagcccgttaatgggtgagagcgtgccttttgtagaatgaaccggcgagttacgttatgatgcgaggttaagttgaagagacggagccgtagggaaaccgagtctgaatagggcggattagtatcatgacgtagacccgaaaccatgtgacctacccatgagcaggttgaaggtgcggtaagacgcactggaggaccgaaccagggcacgttgaaaagtgcttggatgacttgtgggtagcggagaaattccaaacgaacttggagatagctggttctctccgaaatagctttagggctagcgtcgacattagagattcttggaggtagagcactgtttgggtgaggggtccatcccggattaccaatctcagataaactccgaatgccaatgaattatggtcggcagtcagactgcgagtgctaagatccgtagtcgaaagggaaacagcccagaccaccagctaaggtcccaaaataattgttaagtggaaaaggatgtggggttgcacagacaactaggatgttagcttagaagcagctattcattcaaagagtgcgtaatagctcactagtcgagtgaccctgcgccgaaaatgtaccggggctaaaacaatttaccgaagctgtggatacctttataggtatggtaggagagcgttctatgtgtgaagaaggtgtaccgtgaggagtgctggaacgcatagaagtgagaatgccggtatgagtagcgaaagacaggtgagaatcctgtccaccgtaagactaaggtttccaggggaaggctcgtccgccctgggttagtcgggacctaaggagagaccgaaaggtgtatccgatggacaacaggttgatattcctgtactagagtatgtagtgatggagggacgcagtaggctaactaaagcagacgattggaagtgtctgtctaagcagtgaggtgtgatatgagtcaaatgcttatatctgtaacattgagctgtgatggggagcgaagtttagtagcgaagttagtgacgtcacactgccaagaaaagcttctagcgtttaagcatactctacccgtaccgcaaaccgacacaggtagtcgaggcgagtagcctcaggtgagcgagagaactctcgttaaggaactcggcaaaatgaccccgtaacttcgggagaaggggtgctgactttaagtcagccgcagtgaataggcccaagcaactgtttatcaaaaacacagctctctgctaaatcgtaagatgatgtatagggggtgacgcctgcccggtgctggaaggttaagaggagtgcttagcgtaagcgaaggtatgaattgaagccccagtaaacggcggccgtaactataacggtcctaaggtagcgaaattccttgtcgggtaagttccgacccgcacgaaaggcgtaatgatttgggcactgtctcaacgagagactcggtgaaattttagtacctgtgaagatgcaggttacccgcgacaggacggaaagaccccatggagctttactgcagtttgatattgagtgtctgtaccacatgtacaggataggtaggagtctatgagatcgggacgccagtttcgaaggagacgttgttgggatactacccttgtgttatggccactctaacccagataggtgatccctatcggagacagtgtctgacgggcagtttgactggggcggtcgcctcctaaaaggtaacggaggcgcccaaaggttccctcagaatggttggaaatcattcgcagagtgtaaaggtataagggagcttgactgcgagagctacaactcgagcagggacgaaagtcgggcttagtgatccggtggttccgtatggaagggccatcgctcaacggataaaagctaccctggggataacaggcttatctcccccaagagttcacatcgacggggaggtttggcacctcgatgtcggctcgtcgcatcctggggctgtagtcggtcccaagggttgggctgttcgcccattaaagcggcacgcgagctgggttcagaacgtcgtgagacagttcggtccctatccgtcgcgggcgtaggaaatttgagaggatctgctcctagtacgagaggaccagagtggacttaccgctggtgtaccagttgtcttgccaaaggcatcgctgggtagctatgtagggaagggataaacgctgaaagcatctaagtgtgaaacccacctcaagatgagatttcccatgattttatatcagtaagagccctgagagatgatcaggtagataggttagaagtggaagtgtggcgacacatgtagcggactaatactaatagctcgaggacttatccaaagtaactgagaatatgaaagcgaacggttttcttggtttgaatagatattcaattttgagtaggtattactcagagttaagtgacgatagcctaggagatacacctgtacccatgccgaacacagaagttaagccctagaacgccggaagtagttgggggttgccccctgtgagatatggaagtcgcttagctctaatccgccatagctcagttggtagtagcgcatgactgttaatcatgatgtcgtaggttcgagtcctactggcggagtagttaagaaaaaagaggtttaggcctcttttttttataattaataatctatttagtgttatttggtgtgagatatttttgctgagtaaagtttcagagccctccgttttcgatcaaggagatctttttagtactttaattgagggtagcgaagaggctaaacgttgcggactgtaaatacgctccttcgagggattcgaatccttccgcttccattatcttagtttttgaaatttaagtagtaaatttgttcctattctgtcaacttttcctatttgttatctttttgaggttggtattttaacaattcaggaattattaaagattaattgaaattttttgttagaataaggtcataaaaagaaaaggagtatatatttatgctacaaagtatttatgatcagatgatggatttttatagaaatattgaagaagagtatggtatgttcttgggtgataattttgattgggaacatgttcattttaagtttttgatttattatcttgtccgatatcgtattgtgagtcatcgggattttattgtttaccattatcgtgttgcttatcgtttgtatcttgaaaaattgataatgaaacagggttttgttgcttgatgagacagtatgagttaatttccgaacaacttttactttttgtggaaaaataatgataaatagccggaattttttctaaaacattttttaatagttggaaatagcaaatctttctattgtttcttcttgataaaaaggcgattttttcttataataaattgtaagatataattgcaggtgagagtcctgccatgtatgtgagaaaggaagagcctgagggctcagacaagattatgacttcagttgttgttgtaggtacccaatggggtgatgaaggtaaagggaagattacagacttcctttcagcgaatgcagaagtgattgcgcgttaccaaggtggtgataatgcaggtcacacgattgtgattgatggcaagaagtttaaattgcacttgattccatctgggattttcttccctgaaaaaatctctgttattgggaatggtatggttgtaaatcctaaatctcttgtaaaagagttgagctatcttcatgaggaaggtgttacaactgataacttgcgtatttctgatcgcgcgcatgtcattttgccttatcatatcgagttagatcgtttgcaagaagaagctaagggcgacaataagattggtactacaatcaagggaatcggtccagcttatatggacaaagctgctcgtgtgggaattcgtatcgcggatcttttggataaagacattttccgtgagcgtttagaacgtaaccttgctgaaaagaatcgtctttttgaaaaattgtatgacagtaaagcaattgctttcgatgatatttttgaagaatattacgaatatggtcaacaaattaagaaatatgtgacagatacatctgttattttgaatgatgcgcttgataacggtaaacgtgtgctttttgaaggtgcacaaggtgttatgctagatatagaccaaggtacgtatccatttgttacgtcatcaaaccctgtggctggtggtgttacgattggttctggtgttggtccaagtaagattgacaaggttgtaggtttatgtaaagcctatacgagtcgagtaggagacggtcctttcccaactgaattgtttgatgaagtgggagaacgtatccgtgaagttggtcatgaatatggtacaacaactggtcgtccacgtcgtgtgggttggtttgactcagttgtgatgcgtcatagtcgtcgtgtttctggtattactaatctttcattgaactctatcgatgttttgagtggtttagatacagtgaaaatctgtgtggcctatgatcttgatggtcaacgtattgactactatccagctagtcttgagcaattgaaacgttgcaagcctatctatgaagagttgccaggttggtcagaagatattactggagttcgtaatttggaagatcttcctgagaatgcgcgtaactatgttcgtcgtgtgagtgaattggttggcgttcgtatttctactttctcagtaggtcctggtcgtgaacaaacaaatattttagaaagtgtttggtcctaagagatttttaagatttgtttaagataggtcgggtatactatagacagttacaagaagacctcctaacttgttgtaacaaatatcctaaacttttctttttcataataatctccctataaagtcaccgcattcggtggctttttttgtcttgggattcatgatataataataaaatcgataagtaggaaaagagaaacggatgaattatacagttgaagaaaaagaagtctttatgagggaagctttgagagaggctgagattgctcttgaacacgatgaaattccaattggttgtgtgattgtcaaggacggagaaatcattggccgtgggcataatgcccgtgaggagttgcaacgagcggttatgcatgcggagattatggctatagagaatgcgaatctgagtgaggagagctggcgcttgcttgattgcacgctttttgtgaccattgagccgtgtgtcatgtgtagtggggcgattggcctcgcccgtattccaaacgtggtctatggggctaaaaaccagaaatttggcgctgctgggagtttgtacgatatcttgacagatgagcgtctcaatcatcgtgtggaggttgaaacgggaattttggaagatgaatgcgcagctattatgcaggacttttttagaaatagacggaaaaaataattttgcttttaaaatgaataggaatgtgatataataaatagtggagcaacagttctgcgtgaagcgggtcaggggaggaatccagcagccctaagcgatttgaattgtgtgctctttttttcgtgctttttccgaataaataagatagaataatctagaataaatgataatagaaaagagaaaatgatgaaaattcgtggttttgaattggtttcgacttttacagataaaaatttattgcccaagcgtgagacagcgcatgcggctggttacgatttaaaggttgctgtgcgtacagttattgcgccaggagagattgtattggttccgacaggggttaaggcttatatgcagccgactgaggttctctacctttatgatcgttcttcaaaccctcgtaagaagggcttagttttaattaactcggttggggtcattgatggggattattatggcaatactgggaatgaagggcatatttttgctcagatgaagaatattacagatcaagaagttgttcttgaagttggggaacgtgtggtccaggctgtctttgctcctttcttaattgcagatggagatatggctgatggcgttcgaactggtggatttggatcgaccgggcactagaatgaagattatctttgtacgtcacggggagccagattatcgtgagttagaggagcgttcttatacgggatttgggatagatttggcccccttgtctgagaagggacggcagcaagcccagaaactgagcaccaatcctttactcccttcagctgaaataatcgtatcttctgcagtcacaagagctttagaaacggcttcttatgtggcttgtgttactggacttcctttgagagtggaaccattattgcatgaatggcaggtctatgaaagtggcacagataattttgaaaaagctcgtgctatatttctagaaaataatggggagttacttcctaatagtcctattcaatatgagacagctgcgaagatgaagtctcgttttctagaatgcatggctaagtatcgagattaccagaccgtgatagtggtaactcacaacatgctcatgcgtcagtttgtgccaaatgagaagattgatttttgccaagtgattgagtgtgagttagagatatagaaagaggtttatcatcgcaaagaaaaaagcgacatttgtatgtcaaaattgtgggtataattcacctaaatatctggggcgttgccccaactgtgggtcttggtcttcttttgtagaagaggttgaggttgccgaggtcaagaatgcgcgtgtgtccttgacaggtgagaaaaccaagcccatgaaactggctgaggtgacttccatcaatgtcaatcgaaccaagacggagatggaggaattcaaccgtgtacttggaggcggagtggtaccgggaagtctcgtcctcataggtggggatcctgggattgggaaatcaacccttctcctacaagtctcaactcagctgtctcaagttgggactgttctctacgtcagtggggaggagtctgcccagcagattaagctacgagcagagcgcttgggtgatattgatagtgagttttatctttatgcagagaccaatatgcagagtgttcgaactgaggtggagcgcatccagccagacttcctcatcatcgactccattcagactattatgtctcctgagatttcaggggtgcaggggtctgtttctcaagtgcgtgaggtgacagcggaacttatgcagctggccaaaacaaataacattgccatctttatcgtaggacatgtgaccaaggagggcactctagctggtcctcgtatgttggagcatatggtggatacggtgctttactttgaaggggagcgtcaccatacctttcgtattttgagagcggtcaaaaaccggtttggctccactaatgagattgggatttttgagatgcagtcgggtggcttggttgaagtcctcaatccgagtcaagttttcctagaggagcgtttggatggggcgactggttcgtcaatcgttgtgactatggaagggacgcgtccgattttggcggaggttcaggctttggtaacaccgaccatgtttggaaatgccaagcgtacgacgacaggacttgattttaatcgtgcgagtttgattatggctgttttggaaaagcgtgcaggtcttctcttgcaaaatcaggatgcctatctcaaatctgctggcggtgttaaattggatgaacctgcgatagacttagctgttgcggttgctattgcttcgagttataaagacaagccaactaatcctcaggaatgttttgtaggagaacttggtttgacgggagagattcggcgcgtgaatcgtatcgaacaacgcatcaatgaagctgctaaactgggatttactaagatttatgtacctaagaattctttgacaggaatcactccgcctaaggaaattcaggtcattggagtaacaacgattcaggaagttttgaaaaaggtctttgcataatccgtgacaaatccttttaaaaatgataagataggagaaatatttgactatcaaattttcgaggagggaatcgtgtcgtattttgaacagtttatgcaagccaatcaggcttatgttgccctacatgggcagttaaatctgccacttaaacccaaaactagagtagccattgtgacctgtatggactctcgtttgcacgttgcgcaagctctaggtttggcacttggggatgctcatatcttgcggaatgcaggtggtcgagtgacagaagacatgattcgttctctggtgatttcccagcaacaaatggggacaagagagattgtggtattgcaccatacagactgtggtgctcagacctttgaaaatggctcttttcaggagtatttgaaggaagaattgggtgtcgatgtgtcagaccaggacttcttgccctttcaagatatagaggagagtgtacgtgaggacatgcaactccttatcgagtctcccctaataccagatgatgtcattatctctggtgctatttacgatgtggatacaggaagtatgacagtcgtagaattataaatacttcatttagaaagaaagtgtatgaagaaaaacagtattttatttatttttatcttattgctatgtattggtttgcagtatgaaactatctactatacggatggttcgatgtcaggtgcggaatatggactaatgggagtttctatctttctagctctcttttacatgattccggttctttatttccttttccgtattgggaaaaaatgggaattgccaaagaacgctttgattctgtctttattgggtgggatgttcctttcaggctggttgtctagctttgctaatacctatatccatgatttattggagtttcttttcccagatagtgcatttttaaatgcctttgaaagtgctattgtggctcctttggtagaagaaccgcttaaattattgccacttgtctttgttttggctttgattcctgtacgaaaattaaaatctttgtttttacttggaattgcttctggtttgggatttcaaatgattgaggatattggctatattcgtacggatttgccagagggctttgactttactatttcgagaattttagagcgtatcatctcaggaattgcctctcactggactttttcaggtctggctgtagtaggtgtttacttgctttacagagcttataaagggcagaaggttggcaagaaagaggggcttattttcctaggtttagccttgggaactcatttcttgtttaattctccttttgttgaattggagacagagttgcctttagcgattccagtggttacggctattactctctatggtttttatcaggcttatcgttttgttgagaagcacaatgagttgatgaactagaatattttttaaaagaatgatgcaagggtacaaatatggtgcccttcttttatttttgattgaaaaatagtgcaaaaagcgctacaatggtaaatggaaaaatcttgtgaaaagcacaagcgatacatatataccggaggaaatcatgtctttttctgatttaaagctgtttgccctttcttctaatcaagaattggcaaaacgtgtagcgcaggagattgggatagagttggggaaatcaagtgtccgccaattttcagatggagagattcaggtcaacatcgaagaatcaatccgtgggaaacacgtctttatcctacaatcaactagttcgcctgtaaatgacaatctgcttgaaattttgattatggtagatgctttgaagcgtgcgagtgcagaatctgtcaatgttgtcatgccttactatggatatgcacgtcaggatagaaaggcgagagcgcgtgagccaatcacttcaaaacttgttgcaaatatgcttgaagtagctggagtggatcgtttattgaccatcgacttgcatgctgcgcagattcaaggattctttgatattcctgtggatcatttgatgggagctcctctgattgcggattattttgagcgtcgtggtatggttggttctgactatgtggttgtcagcccagaccatggaggtgtgactcgtgcccgtaagttggcagaatttttgaaaacatctattgctattattgacaaacgtcgtagcgttgataagatgaataccagtgaagtcatgaacatcatcggtaaggtagaaggcaagacttgtatcttgattgatgatatgattgatactgctggaacgatttgtcatgcggcagatgcccttgcagaagctggtgctgttgaagtctatgcgagctgtacgcacccagttctatctggtccagctatggacaatatccaaaattcagctattaagaaattggttgttttggataccatctatctgccagaagagcgtttgatcgataagattgagcaaatttcaatcgctcatctcctaggtgatgctattgtacgtatccatgaaaaacgcccactttctccacttttcagtattgagaaaaagatttaatgaccaagcctgagatgattctcaggttttttcatctcttttccgaataaatagatagagccagagaatctagaaaacctagatttaaaactgtggtataataaaaggaggaagaggatgattctcagacatccgggcatcagtccgaccaatgatttggttgctaagaaaatctttagcaatccagaaatcacttgtcaatttattcgcgatatgttggatttaccagccaaaaaatgtaccatttttggaagggagcaaatatcatgtcttgccatccctgaccttactcggctcaggatttctataccagtatagacgtcttggcggagttggataatggtacgcaagtaattattgaaattcaagttcatcatcagaattttttcatcaatcgcctgtgggcttacctgtgcagtcaggtcaatcaaaacctagaaaaaattcgtcaacgagaaggtgatacacaccagagttacaaacacatcgcaccagtttatgctattgctattgtggacagcaactacttctcagatgacttggcttttcatagctttagtatgcgcgagaacacgacaggtgaggtcttaaccatcacaaataacggtcaagaacaccatctagtcaagatggcgttcttggaattaaaaaaatacagagaaaccagcaaagatagcattcgtaagccatggttggagtttttcggtaacaaaccctttacccaagaacccgagcgagccatcagccaggcagaccaactgctggactacaagagctggtccgaggaggacaggaaaatgtttagtcaactacgtatgcgcgaagaacaagccttgttagcacaggactatgccctggaaacagctagagcagaggggctggaacaaggtattgaacaaggtttagagcgtggtcgtgcagagggaattgaaaaggggcgagaagaaggtcttgaacaaggactggagcgtgggaaattctttgccttcttagatatggttcgccaaggtcttttgccttctgaagttgctagcgagcaattaggcatgactgtctctgagtttgaggcactattgaaagattaagaccatcacaaataacggtcatgaaaaccatctagtcaagatagcattcttggaattaaaaaatacagagaaaccagcaaagacgaggttcgcaagccctggttggagttttttgggaacaaaccctttacccaacaaccagagcgagccatcagccaagcagaccaactgctagactataagagctggtccgaggaggacaggaaaatgtttagtcaactacgtatgcgagaagaacaagccttgttagcacaggactatgctttggaaacagctagggcggaaggtattgaacaaggtttagaacgtgggaaagttgaaggaagagtctttgctttcttagatatggttcgccaaggtctcctgacttccgaggttgccggccagcagttgggcatgacggtcgctgagtttgaggccttgctataaggtcacattttaaatagtagaaagttgatgaaatggcaagttcttatcaaaaaacttgccatttttacttgacatttagaagtgtttataagataataccatagacgtgagttctgtccaactgtctatgtggattagatatgaatgattatactcaagggtcaaaagtttgtgagattttcacttgaatctaggatgttttaagcgtattcactctcaaaaagttgtttttttcacctttttttctaaaaatgggtaaaaactttaaaaactagaagaaaacccttgacaaatcctgcaaatatttatatactgtatggtagtaagatagtcttacgaaaaaatatataatgaaaaatgaaggagataaaacgatgaaaaaagttttattgacaagcgcagtcgctcttgcagcatttggtgctgtacaagcagtttcagctgattcacaagcacaatacagtaatggtgtagtaccagaggctaaccaatataaaccagcaactccagttacaaacccatacgctgtaagaaatcgtatcggtaaagatggtaaagttttaccagatgtatttggaaatggtactcatgttcgtgtacatgttaaagatatccaagggaaccctgtagcaggtgctaaagtagctgctttggtatacgcaacagtagaagactttgacaactacaaaaaaccagctttgattgaagcagttactgatgcagcaggtgatgttgagtttcctcttgcaaacggtggttatgtagtttaccgtattgatgaagctccaaaaggttactttgttcctgctaaacttacagtaggtactctacttgatgcagaagaagttgtacgtgaaggttcagacatgttcgttactggtgaattagtaattgaaaaaactgatacttacaatgtagctaaagaagaatgggtacaagaagaaactggttggaaatactatgcatctaacaaagctgtaactggttggaaacaagttgacggtaaatggttcttctttaacgctgaaggcgtaatgcaaaaatggtgggttaaagatggaaacacttggtactacctaaacggaaacggtgaaatgcaaactggttggttgcaagacggtggtaaatggtactaccttgaaacatcaggtgctatgaaagctagccaatggtttgaagttggtggtaaatggtactacgttgacggttcaggtgcccttgcagttaacactactgtgggtggatacactgttaacggaaacggtgaatgggttaaataatctagctcaataaaaaagcaggagatttcttctgctttttattttttccataaaaagttcagtttttcttagaaatttttgtaaaaataagatacaataaagagaagcataatagctaaatttaagaatggagaatcttcacatgaaaaataaaaaagctttagctctagctcttgctagtgttacaatggcaagtgcagcagttttgacaagttattctgctacaactgctagttcagtaagtgcggaagaagttgtttatagaactgagtggatcacagtgattaatggtcgttcacaagaacgtaaaacagtattttttgaagatgggaatcagccgatctctaaacattcgacaattgaaggctttgaatttcaacgtgcctatgttgaaggtggaagaaaatactatttgtttgttgaaaaaggaacaaaaatagaagattatgcaaatgatccagatgctccagtgagtgagttaaatactcagggatataaaacatctgacaaggacgtaaaatggcgtgagtcagcagggaaccgttatctttactataaaggtaacccagtaaaaggttgggcaagtgtcgatggtaagacttactactttgatagtgaaggtgttatggcacgtggtgtcattgaaaacacatctgaacgttactatctagacggacaaggtgttaagaaaactggtttcattaaagtaggagaaaaaacctattattttgtatcagatggagctcgtaagacagagattatctctgaaaatggaaaaacttattttgtcaaagatggtgttgtgacaactggagctcataaggtaggtgctaaatggtatttctttgctgaagatggtacaaccaagtcaggtattgtaaaagacagtgctggtaaatggtattacatcacagcagaaggtgaacgtaagactggtcttatcaaggatgctggagataagtattactatgttactgaggaaggtgagcgtaagttcggtgaaatcactgttgatggtaaaacgtactttttgacagatgattctgatactaaagctggctggaacaaagttgacaatcattgggtttatgttaataaagaaggtaaacgtcaaactggttggcttaaagacggtggtaaatggtactactttaatgctgaaggcgtgatgcaaaaatggtggatcaaagatggtaacaaatggtactatctaaatggttcaggtgaaatgcaaactggctggttgcaagatggtggaacttggtactacctaaacagctcaggtgctatggaaactggctggttgcaagatggtggtgcttggtactaccttaaaggctcaggtgccatggtaactggttggttccaagtaggtggtaaatggtactatgcttatagttcaggtgcccttgcagtaagcactacagttgatggctattatgtaaatgccaacggtgaatgggtataaaaagactaagagagtagttttagaactgctctctttttttacatttaaatatttctacactttttatgttttttattgcatttattataggaaaaagatataatctagataaatttaaccatttaataaaggagggttttcccatgagaaaaacagtaacaggtatcttgctagccacttctgtgctagctatggcgacagttcaacaagtacaggcagctgatgcagggggagcaacgactacaacaacttctacggttaaagaagtccgctatgcaacatataaaaatggtggacctgtcaatgtcaaagatgcactaacagggtctgctgtgacagctgaatctattcagaatcatcctgaaattgaaaattatatctatacttctagtagagaagagaatggtattatgtatcatatgtatgctccaaaagctactgattctaatacaaatgctggtactcaaaccaatccgtaccgtcaaaacaatggcactagtaatgctaatgggaacaataaccaaaatggtactggttcaaacaataatagtggctcaacaacaaattctaattctccagtaaaaacagttcgttttgtcgaatataaagctggtagtgatgttccaattgatattaaagatccacgtacaggatctgaagcatcagacacaagccatccaacaattgctaactatgagtatgttactggtaatttaaaagatggtattctttatcatgtctatcgttcaaacacagctactaatgctggtaacaacaaccaaaatcaatctacaacgacaagtggcggtcagttcaaaacagagaacggaaaagtctactatatcaaggacggtaaaaaggttagcggttggcaaaaaatcgatgataagacttactactttgaagctgatggtgctatgaagaaaggtctattgactgcaggtgataagcaatactatctagatgaaaaagatggtgttaaaaagctaggctttgtaaaagttgctgacaagacttattattttgtagaagatggtgagaagaaaactggttttgttaaaattgatgagaaaacttactatgtcaaagaaggtgtccgtctaactggtgatattactgttgatgggaaacattattttttggatgaggaaggtgtccttaaacaagggattgttatgattgatggtaaaaaattcttcatcgatagcgaaggaaatcgtcaggctggctggaagaaggtcgagattgactggtactatttctctaaagaagatggaatgaagactggttggctgaaagatggtggtaagtggtatcattttagtgccgcaggcgtgatgcaaaaatggtggtttaaagaaggtgacacttggtactacttaaatggttcaggcgaaatgcaaactggttggttgcaagatggtggcacatggtattatctaaatggttcaggtgccatggcgacaggctgggctcaagttggtggtacttggtactacttaaacagttcaggtgctatgaaaactggttggttgaaacaaggtggtagttggtattatcttgatggttcaggcgctatgaagactggctggttccaagtagatggcaaatggtactatgcttatagttcaggcgcccttgcagtaagcactacagttgatggttattacgtaaatgctaacggtgagtgggtttaaaagtgtaaaattcaccatagaaaatgtaaataataaaaagaaaacaaaaggaaagcttataaaataggctttctttttttgttatgagagctgtatttgaaaattaatataagtatataattgtataaataaaataatctattacttgattatatttttagaaagcgttataataaatccaaatatgattctaaaaaaggggtttcaaatatgaataaaaagaaaatgattttgactagtttggctagtgttgctgttttgggagcggcatttgttgcatctcaaccatcagttgtaaaagctgatgattctacaacaagtcaacctacagctactaaacctgctggagaaactggagctgctgacacttctaaatcagaagttacaagtccagaaattaaaaaagctgaagatgacgctaaagctgctgaagctaaagttactgaagctcaagcaaaagtagatacaacaactactgcagctaacgaagcaaatactaaactagaagctgagaaaaaagaagctgctgatgctaaaactgcaaaaactgaagctgaagaagctaaaaaagctgctgatgctgaattagctgctgctaaagaaaaagctgctgaagccgacgccaaagctaaagaagaagctaaaaaagaagccgacgctaaaaaagaagaagcagattctaaagaagctttaactgaagctttgaaacaacttcctgataacgaattgcttgacaaaaaagcaaaagaagatttattaaaggctgtagaagctggtgacttaaaagcttctgatattcttactgaattagcagatgatgataaaaaagctgaagctaataaagaaactgagaaaaaattaagagataaagaccaagcttctactgctaatgctgatgcaactccagctaaagaagctaaaactaaagatcaattaccagcagacattaaggctggaattgacaaagctgaaaaagcagatgctgctcgtcctgcatcagaaaaacttcaagataaagctgatgatttaggtgaaaatgttgatgagcttaaagaagatgctgaagcattgaaagctgaagaagataaaaaagctgaagctcttaaaaaacaagaagatacattaaaagaagctaaagaagctcttaaatatgctcaagacaacggttctgatgctgatatcgttgcttcattagataaagctgtaaaagctatcgaaaaagctaaagaagttgctcaagatgcattcgataaagctgcttctgatactcaagctgttgctgatgaattaaataaacttactgatgagtataacaaagctcttgatgaagtaaaagctgctaaagaaaaagaagctaacgaaccagctaaaccagtagaagaagaaccagctaaaccagcagaaaaaacagaagcagaaaaagctgctgaagctaaaaaagaagctgacgctaaggttgctgaattagagaaaaaagttgctgaagaagctaaaaaagtagaagaagctacagctaaagctactaaagaagctgaagatgtaaaagctgctgaagaagctaaaaccacagctgataaagcaaaaactgacgcagaagctgaattagctaaagctactaaagaagctgaaaaagctaaagctaaagttgaagagcttaaaaaagaagaaaaagacaacttagaagctcttaaagctgctttagatcaacttgaaaaagaaattgatgctgatgctaaaattacaaataaagacgaagctaaagctgcaatcggtaaagatgctttattaaaagctatcgaagatggtgttatcactgctacacaagctgctaaagaattagaagatcaaaatgcgactgctaaagctaacaaagatgtcgaaaataaattaagaaataaagatcaagtaaacgatgcaactcctgctacaacggctccaactatcaaacatggagataaacagcctgctgaagattctggagaaaaaatttctgatacagataaaaaagcatttgatgaagctgataaaaaagaagcttctaaaccaattgttaaaaaacttcaagatatcgctgatgatatagctgaaaaaatcgaaaaattaactaaagtagctgataaagacaaagctgatgctactgaaaaagctaaagcagtagaagaaaaaactgctgcattaaataaacaaaaagaaactttagataaagctaaagctgcacttgaaacagctaagaaaaataatgctgagcaagctatccaagatggattacaagatgctgttactaaattagaagctgctgttgcttctgctaaaactgctgctgatgaagctcaagctaaattcgacgaagttaacgaagcagtaaaagcttataaagatgcaatcgatgaactaactgacgattacaacgcaactttaggttatatcgaaaacttaaaagaagttcctaaaggtgaagaacctaaagacttcgcaggtggagtaaatgatgatgaagcaccaactggcgacgctaaacaacctgatgaggttccaactgttccaaatgctcctgaattcaatggtggggtaaaccctgctgaagctgctactgctgaagaaaaacctgagttcaatggcggagtaaacgctgctgaagctgctactactgaagaaaaacctgagttcaacggtggtgtaaacgatgaagaagcgcctacaactgaaaatactcctgagttcaatggtggtgtaaatgatgataacgctactactcaacctaataatccagaatttaacggcggagtgaatgatacaacacctccaactgagccagctaaaccagaaggtgaagcaccagctgagcaaccaaaaacagaagttccagatattaaatctgaaatcaaacgtcttgaaaaagaagttgaaaaacttgaatctgacgtgaaagatgcagaaaatggtgctgaagattattttgtagaaggattgaaaggtgaattagataaagctaaagcagaattagaagaacttaaagctgcttggttaaatcttgtgaatgataaacctgaatttgatttatcaaaattaaatgaaggtaaattacctgaatcgaataaagaaaatacagcgccatcaagacctgaaaaaccagctcctgaatttccaatcccagctaaagttggaacacctggaaatccaccgcgtgaaaattctgatactacagctgtcaatgaacctgcacttgtaccaaaaacaccatcagctcctggaacagatgcttcagctacaccaacagctgatacaccatcaactcctgcggttgtaccaactgtagcaggtactaacaaagacaatacttatcaagccccagctgcaaaagctgaagataagaaagaacttccaaatactggtggtaaagataatgttgcaattgcatcattaggattccttggattgctccttggtgcccttccatttgtgaaacgcaaaaactaattagttgaagatataaaagagaaggatttatgaccttctctttttgtgatatggactatagtgagagttctgttgaaaagaagaaaaaagtgaacaaaacgatgtttcagatttgttcacttttatgttattctataaacttacaatagtgcctcaaattcagcgactgtcatgcccaactgctgactggcaacctcggaagtcaggagaccttggcgaaccatgtctaagaaggcaaaaagtttcccttcttcccttccttcaactttcccacgctctaagcctttttcttcagcttgttccaaggcatagtcctgtgctaacaaggcttgttcttcgcgtctgcgttgttcactaaacattttcctgtcctcctcggaccagctcttgtagtccagcagttggtatgcctgactgatggctcgctcgggttgttgggtaaagggcttattcccgaaaaactccaaccacggctttcgaatcttgtctttgctggtttctctgtatttttttagttccaagaatgccatcttgactagatggttttcctgactgttgtttgtaattgttaaagcctcacctgtcgtgtcctcgcgcatactaaagctatggaaagccaagtcatcttggaaataattgctattcacgattgcaatggcataaacgggggcgatgtgtttgtaactttgatgtgtatcaccttctcgttgacgaattttttcgagattttgattgacctgactgcataagtaagcccacaaacgattaatgaaaaaattctgatgatgcacttggatttcgataataacctgcgtgccattgtccaactctgccaagacgtttatactggtatagaaatcctgggccgagtacggcagggaaggcaagacgtgaatgttacttccctccaaaatcgtcacattttttgcaggtaagtccagcatatcgcggataaattgccaagtgatttctgggttgctaaagattttcttagcaaccgagtcattggttgggctgatgcctggatgacgtaatgtcatattctttctcttttcattatagcacattttcaaatctaggtttactggattctctgactctatctatttattcggaaaaaggatgaaaaatactcggtctggctcttcccaatggtattttttggtgctttcctttataatgggtgtatggataagaaaaaattattattgattgatgggtcttctgttgcttttcgggcgttttttgcgctctatcagcagttggatcgttttaagaatgcggctggcttgcataccaatgcgatttatggctttcagttgatgttaagccatttgttggagcgggttgagccgagtcatattttggtggcttttgatgcgggaaagacgaccttccgtacagagatgtatgcggactataagggtggtcgggctaagactccggatgagtttcgtgagcaatttccctttattcgtgagttgctggatcatatggggattcgtcattatgagttggctcagtatgaggcggatgacatcattgggacactggataaactagcagagcagaatggttttgatattaccattatcagtggggacaaggatttgattcagctgacggatgagcatacggtggttgaactttccaagaaaggtgtggctgagtttgaggcctttacgccagaatatctcatggaaaagatgggcattacaccgacgcagtttatcgatctcaaggcgctcatgggtgataagtcggataatatccctggggtgaccaaaatcggtgaaaaaactggtatcaaactcttgctggagcatggttcgcttgagggaatttatgaaaatattgatgggatgaaggcttctaagatgaaggaaaatctcatcaatgataaggaacaggcctttttgtcgaaaaaactggcgaccattgataccgaggcaccggttgagattggtttggaggatttggtctatagtggtccagatgtggaaaatcttgggaaattctacgatgagatgggcttcaaacagctcaagcaggctttaaatgtgtcgtcagctgatgtggctgagagtttggattttactattgttgaccaaatcagtcaagatatgctgagtgaagagtctatcttccattttgagctttttggtgagaattaccatacggatgatttggttggattttcctggtcttgtggggataagctttatgctacagacaagcttgaacttttgcaagagccgattttcaaggcctttttagaaaaaacacctctgagagtttatgactttaagaaggctaaagttctcttgaatcgttttggtgtggatttgcaggcgcctgcttttgatagccgattggctaaatacctcctttcgactgtggaggacaatgaaattgcgaccatcgctagtctttatggtcagacttatttggttgatgatgagactttctatggtaagggagtcaagaaggccattcctgaacgcgagaaattcttagaacatttggcacgtaagattgcagttttggttgagactgagcctgttttacttgaaaaactcagtgaaaatgggcaattagagcttctttatgatatggagcaacctctggcttttgtccttgctaagatggaaattgctgggattaaggtcaagaaagagaccttgcttgagatgcaggctgaaaatgagcttgtcattgaaaaactgactcaggagatttatgaactggctggtgaggagtttaatattaactcgcctaagcagttgggcgtgcttctctttgaaaaattggagctacctctagaatacactaagaaaaccaagactggatactcgacagcggtggatgtgttggagcgcctagctcctattgctccgattgttaagaaaatcctggattaccgtcagattgccaagattcaatctacttatgtgattggcttgcaggactggattttggcggatggcaagattcatactcgctatgttcaggatttgacccagactgggcgtctgtctagtgtggatccaaacttgcaaaatatccctgttcgcttggaacaaggtcgtctcattcgtaaggcttttgtgccagagcgggaggatagtgtactactcagttcggactactcacagattgaattgcgcgttttggcgcatatttctaaggatgagcacttgattaaggcctttcaagagggggcagatatccatacttcgacagccatgcgggtctttggcattgaacgtcctgaggatgtgactgcaaacgaccgtcgcaatgccaaggccgttaactttggagtagtttatgggatttcagactttggtttgtctaataatttgggcattagccgtaagggagccaaagcctacattgatacctactttgaacgcttcccaggtattaaaaattacatggatgaagtggtacgtgaggcgcgtgataagggctatgtggagaccctcttcaagcgtcgtcgtgagttgccagatatcaattctcgcaacttcaatattcgtggttttgcagagcgaacggccatcaactcacctatccagggttcggcagcagatattcttaagattgccatgattcagctggataaagccttggttgcaggtggttatcagactaagatgctgttacaagtgcacgatgaaatcgtacttgaagttcctaaatctgaattggcagagatgaaaaaattggtcaaacaaactatggaagaagccattcaactcagtgttccccttatcgcagatgagaatgaaggggcaacctggtacgaggctaaataaaaagggggctagtcctccttttttgtagtagaattatgcaagccttttcaaaatatgctatactgatgaaaaaggaggatttctatgagtcaagaatttatcaatccaagtgatggcgtgattcgtcagtatctcgcaacgagtaaaacccttgctgtggtgggcttgtctgaccgtgaggaaacaacgagcaatcgagtgaccaaggaaatgcaggctcggggttataaaatcattccagtcaatcccaaggtggcaggtggcgaaatcttgggtgaaaaggcttatgctagtctagctgagattccttttcctgtagatattgtcaatgtttaccgtcgcagcgagtttctgcctgatgtggcgcgtgattttctcaaagctgatgccaagattttttgggcacagctaggacttgaaagtctagaagcggaagaaatcttgcgtgctggtggatgtgatgatatcgtgatgaatcgttgcatcaagagagaacatacacgcttgattgaggaagcataagaaaaaggtagctgatgggctaccttttgtgttatactcaatgaaaatcaaagagcaaactaggaaactagccgcaggttgctcaaaaaactgttttgaggttgcagatagaactgacgaagtcagctcaaaacactgttttgaggttgtagataagactgacgaagtcagtcacatacctacggcaaggcgacgttgacgtggtttggagagattttcgaagagtttagaaaataccgataagggtctgcataccaagactagtgaggatgatggcaatccagcagatggctccgagaagaatggattttccactggatttgaccatagcgaccagattggttttgagaccgatagcactcatggccatgacaataaggaatttagagagttgtttgagaggggtaaagaaactactggacacacctagagaggtgagtagtgtagtgaggagagaggcaaggataaagtaaaggataaaaagtgggaagacttttttcagttgtaggctttgcttgttttcttgttggcgactttgccagtaggatagaaagagcgtgatagggataatggccaaagtacgtgtgagtttaacaatggttgcagactcgagggtattggtctggtagagactatcccaggcgctagctgtggcggttacagaggaagtatcattgactgcagttcctgcaaagagggcgaagccgtcattggatagatgaagccaggtgccgagggttggaaagatgagcgcagccaagacattgaagaaaaagataacggagatggcttgggctacttccttttccttagcatggataacgggcgctgttgccgcaatggcagagcccccacagatagaagaacctactccaatcaaggtagccagttttgtgtccagtgcaaagaagcgctggaaaagataggcaacaatcaaggctattgaaatggtggacaggatgacagggagtgaagattgcccaactgcgaagacttgcgagatattgagaccaaaaccaagcaagataacggcatactggagcaattttttagaactaaaggtcaatcccgcatccagttgtttataggatgagagaaagggatgaagaagcatgcctatgaaaatcgcaaagacaggcgcgccaatgacagggaagaatcctcctaagtaccaagatatgatggaaatgagaaggcaggccaagatgcctgctccattttttgatagaaatgacataaaaacctccaaatagaatctgttaccattatagacctgtaaacaggaaaagtaaaatagaaagtggagctaacaattatttgacaagtagtgctaatcatgtgataataatcttacaagaactgtaacgaagtcttggcaaaaaacaaagatactagagctccacctctggtattttttgtcgcgcttatctaatccaaactaagtccgttagtagagttgcaataaattcattttaaatacttcaatttgttatgctagcgttattctatcatgtatttttgcggtcggggggcttttgtagtataatagagatacgttttgacagtaggaggtatctatggacttaactaagcgctttaataaacagttagataagattcaagtttcgttgattcgtcagtttgaccaggctatttcggagattcctggggtcttgcgtttgaccttgggggaacctgattttacaacgccagatcatgttaaggaggcggccaagcgggcgattgaccagaaccaatcctactatacagggatgagtggtctgctgaccttacgtcaggcggccagtgattttgttaaggaaaagtaccaactggactatgctcctgaaaatgaaatcttggttacaattggggcgacagaggctttatctgccactttgacagctattttggaagagggagataaggtgctcttgccagctcctgcctatccaggttatgaaccgattgtcaatctagttggggcagagattgtcgagattgacacgactgaaaatggttttatcttgactcctgagatgttggaaaaggctattttggagcagggtgacaagctcaaggcggttattctcaactatccagccaacccgacaggaattacctatagtcgggagcagttggaagacttggcagctgttttacgcaagtacgaaatttttgttgtctgtgatgaggtttactcagaattgacctatacaggggaagcccatgtatctctgggaactatgttgagagatcaggcaattattatcaatggtttatcgaagtcgcatgctatgacgggttggcgtttgggtctgattttcgctcctgcagcctttacagcccagttgatcaagagtcaccagtacttggtgactgccgcaaataccatggcgcaacatgctgcggtagaagcccttacagctggtaaaaacgatgcggagcctatgaagaaggaatacatccagcgtcgagattatattatcgagaaaatgactgctcttggttttgagattatcaaaccagacggtgccttctatatctttgctaagattccagcgggctacaatcaagattcctttgcttttctgaaggattttgcccagaagaaggctgttgcctttatccctggtgcagcctttggacgttacggggaaggatatgttcgcctatcttatgcagccagcatggagacgatcaaagaagccatgaaacgacttgaggagtacatgagagaagcatgattcagtctatcacgagtcaaggcttggtgctctacaatcgcaattttcgtgaggatgacaagctagtcaagatttttacagagcaggctggcaagcgcatgtttttcgtcaaacacgctggtcagtctaagctagctcctgttattcagcccttggtgttggcacgatttctcttgcgaattaatgatgacggactcagctacatcgaggactatcatgaggtgatgacctttcctaagattaatagtgatctctttgtcatggcctatgcgacctatgtagcggctcttgcagatgcgagtttgcaggacaatcagcaggatgctcccttatttgcttttttgcaaaagactttggagttgatggaagctggcttggattatcaggttttgactaatatttttgaaattcaaatcttgactcgatttgggatcagcctcaattttaatgagtgtgccttttgtcatcgggttggtcaggcttttgatttttctttcaaatatggagcctgtctttgcccagagcattatcatgaggatgagagacgttgccatctcaatcccaacatcccttatctgcttaatcaatttcaagccattgattttgagaccttggagaccatttcgctcaagtctgaaatcaagcaagagctacgccaatttatggatcaactctatgaagagtacgttggaattcatctaaaatcaaagaaatttattgattccctatccgactggggtcaattactaaaagaggagaacaaatgaaaaaaattgcagtagatgcaatggggggcgattacgcacctcaggccatcgttgagggtgtcaatcaagccctagctgacttttcagatatcgaggttcaactctacggagatgaagctaaaatcaagcaatatctgacagcgacagagcgcgtcagcattatccatacggatgaaaagattgattcagacgatgaacctacgagagctattcggaagaagaaaaatgccagtatggtattggcagccaaggctgtcaaagaaggcgaagcagatgctgtactctcggctgggaatacaggtgctttactagcagcaggattcttcatcgtgggtcgtatcaagaacatcgaccgtcctgggcttatgtcaacattgccgactgtagatgggagaggttttgacatgctagaccttggtgctaatgcggaaaatacagcccagcacctccatcaatatgcggttctaggttctttctatgctaaaaatgttcgtggcattgcgcaaccacgtgttggcttgctcaataacggaacagagagtagcaagggcgatccgcttcgtaaggaaacttacgaattactagcagctgatgaaagtttaaactttatcggaaacgtggaatcgcgtgatttgatgaatggcgttgcagatgttgttgtggcagatggtttcacgggaaacgctgtgctcaaatccattgaagggacagccatgggaatcatgggtttgctaaagaccgctattacaggtggtggtcttcgagcgaaactaggcgccctccttctcaaggacagcctcagaggtttgaaaaaacagctcaactactcagatgttggtggagcagtcttgtttggtgtcaaggcaccggttgtcaagactcatggctccagcgataccaaggctgtgtacagtacgattcgtcagattcgtaccatgctagaaacagacgtagttgcccagactgcgcgtgaattttcaggagaataaaaaagatgacagaaaaagaaatttttgaccgtattgtgaccattatccaagagcgacagggagaagactttgtcgtgacagaatccttgagtctgaaagacgatttggatgctgactcagttgacttgatggagtttatcttgacactggaagatgaatttaatatcgaaatcagcgatgaggaaattgaccagctgcaaagtgtaggggatgtggttaaaatcattcaagcaaaataaagataagaagttccaaggcatttgctttggaatttttctttggttcaagtgaccgtttaggaacagatttagtctttctagggacagtagaaatctgaggagaaataaggaatataatgaaattagaaaaatcaatctccaaaaaggaaataagaaataaagatcaaatgaaaatatcaatgagtttctgctagaatgaaattgttaatatagtcacaattttaattgactttccttttttacaggactataatgtagatataaaaaaggatttattttatagttgtgggaaggtgatggctatgtacttttgataaactagtctctatcttttgttcttggaaattttaggagttcttatggttcaggttcatgaacctgacatctattttgacttcgtttctattggattttcttgctttggatttatctattttaggaggaaagaactatgaaaaaatctaaacttctcactcttggtttgcttgcaggtgctggtctacttttgacaatcaatcaagcacaagctgcagatacttgggttaaaaatggtgctgactggaatctttcacaagatggcagtttcgctaaaaacaaatgggtacaaaacgcaggttcttggtaccactttgacggttctggtaaaatgcagacaggctggctcaaagatgggaatacatggtattcgctcgcagacagtggcgctatgcgtactggctggtacaaggaaggtagcacctggtactcacttgcaaatagtggtgctatgcgtacaggttggtacaaagaagggtctacatggtattacctcaaagacagtggcgctatggcaacaggatgggcgactgcaaatggtcaatggtcttactttgaaaaatcaggtgctatggtagcagatagagctgttccagcaagcgatggggaaagttatgtcattggtaaggatggttatatgttaaccagacttccaagtgaagttgaacaagatccttttgatgatacagttattacagatatcgttactttgtctgatggttatgactatcaccttgttcatcataagaaagatggagttgttatcgaaaagaatgcctggtatatcaaacctattgttgaacgtttttcttatcaaaagattggcgatataaaagtaaatactttagatgcaattactgataataaaaaaccaggggaagaaattgatcctaaagctgtcataaagaatttccaaaacttaccaaataagtattactttggagcagatggacgtaaggttgcgaatctaccagaattcactactcacttccctattcaaaaagttggatctgaactttatcttagaaattcaagtccagttattagtctagaatcatctggatttacaattaatgacaataaactttatctaagagatgtcaatgatcataatggtaaacttataactggatatttcacaatgtttatggacggattatcatataaagatcaccatattttaggctatgcagatgaatctggtgaaatcgtgaagatgaaagttttgcctaatgatttccgtggtcatattgaaaaaggaatttccggtttttatggagaaactgttcgatacgacagttcaacaggaaatgtttctgttgtgaaataaactatctgacagagtaaaacgaaaaagcgaacagctttgtatactaggaagtcatgttcatttcgctatagaataggaggaaatggctatgaaaaaatctaaactacttacacttggtttgcttgcaggtgctggtctgcttttgtcaatcaatcaagcacaggctgcagatacttgggttaaaaatggcgctgactggaatctttctcaagatggcagtctcgctaaaaacaaatgggtacaaaacgcaggttcttggtaccactttgacggttctggtaaaatgcagacaggctggctcaaagacggcaatacttggtattcactagcaaatagtggcgctatgcgtactggctggtacaaggaaggtaacacatggtactcgctcgcagacagtggcgctatgcgtacaggttggtacaaagaagggtctacttggtactacctcaaaggtagtggcgctatggcaacaggatgggcaactgcaaatggtcaatggtcttactttgaaaaatcaggtgcaatggtcgcagacagagctgttccagccagtgatggggaaagttatgtcattggtaaggatggatatctgttaaccaaactcccaagtcaggttgaacaatctcaagcggatgatacaattatcacaaatattgttactttatctgacgggtatgattatcatcttatttatacaaaagatggagtcattgttgaaaaaaatgcttggtacataaaacctgaatttaagaagttttctgataaatatggagataaagtttccaatacgatgttggctttagtagataatacggaagaaggacaagaaattaatcctaaagctgtcgtgaaaaatttccaaaacttaccaaacaggtattactttggggcagatggtcgtcgcgtaacaaatttaccagaaatgaccacctattcagagattaaaaaagttggaaatgatgtctatctagaaaatccaggtgcacgactttttcttggagctaccagcttcacaatcaataataataaactatactatttagatggtgataatggcaaactaaaaacaggctatctagcattgattgatgatagaccaagctatcatcactatcatattcttgtttatgcagaccaatctggtgaaattcttaaaatgaaacgattgccaacaggaatttcagattatcttaataaagaaattgacggtttctacggtcaaactgttaaaatcgatagtaagacaggaaatgtttctgttgtgaaataaactatttcacatagtaaaacgaaaaagcgaacagctttgtatactagtaagtcatgttcatttcgctatagaataggaggaaatggctatgaaaaaatctaaactactcactcttggtctgcttgtaggtgctggtctacttttatctatcaaccaagcacaggctgcagatacttgggttaaaaatggcgctgactggaatctttctcaagatggaagcttagctaaaaataaatgggtgcaaaatgctggttcttggtaccattttgacggttctggtaaaatgcagacaggctggctcaaagatggcaatacctggtattcactagcagatagtggggctatgcgtactggatggtacaaggaaggcaatacctggtattcactagcagatagtggcgccatgcgtacaggttggtacaaagaagggtctacttggtactatcttcattttagtggttctatgatgacaggttgggtgttcatagatggtaattggtattattttgaacaatcaggtgcaatggcctctgatagagttgtaaattctagtgatgggacaggctatattctcagcaaggatggccatatgttcactttacaaaatagcccttataaacatggtgacattgttcgtttaggcgatggatatgaatatctgattaaagcaaaatttgacggaaataactttactgatgttatcgtggataaaaacacttggcatattaaacctgagttcaagaagttttccgacaaatatggggatgaggttgcaaatacaaccttagctttagtagataataaagaagaaggacaagaaattgatcctaaagctgtcattcgtaatttccaaaatctaccaggtcgatattactttggagcagatggtcgtagagtattaccacttccagagatgacaactagatcagaaatcaaaaaagttggcaatgatctttatctagaagacccaggtgtacgacttcgatttgataacttcacaatcaataacaataaactatactatttagataatggacaaagtaagctcaaaacaggttactttgtactgattgatgatggtatggctacaacccactatcacttacttgtatatgcagaccaatctggtgaggttcttaagatgaaacgcttgccatcaagattttcagattattttgacaaagaaatcgatggtttctatggtcaaaaaattaagattacacagccaaataagtatgaatattacaaggttcttgtggtaaaataaatagataagcaatcttcacaacgaatataaaattaaaacgtgcaaatcattttcaagaggctttagatttcttgtattttaaaagaaactaaagccttttgtggatgtattgtttttcagaaagtatgaaaaactagagagttgtatcggggagataaatattatttcgcttaaataaattaggagtcgttttattctatgattattttagaattcttagtttctgtgctatatattctgttggtagtcgtttcaaccatggtgcctactatttatttgggtgctcaaatttccccagaattttataaaaaacgttattggatacttatatttttaattagtttatctgctcgtcaaacatttggagaattatttcatataggagttcttctcttcttttactgtatttttttattagtattgcacaagggaaaaggggaatctctttttctttctctgtatctttttctcttctttcaaagtattcgttatttatttttgacaatttggattcgtgtattatctggtgagcattgttgtttcgtagattcgttttctactttatatatatctatatttgatttattatcaatctttctatgttgtaaaattatgaagcgttggtctttggatttggatttattcttttcagatacttttaaaacccactatcgtaagagttttttcattatcctacctctgactggatttaggatattctcttcgtttatgaccaatagaaatagttctttctacgttcgttttgacacgaccatttctctcctgattttcattctctttttctcttggctcttttatatcagacacttagagcaggtttatcgtgatgagcagaccattcagagacaggaagatgagaatcgttccttgcaagggatggtggataagctgggtcatctctatgatgaagttcgaggttttcgtcatgattttgcaggaattgtcgctagtatggagcctgctatagctaatcaagatatgactgaggtgtctaccatttatcaagatgtctttctaaagaccaatgaaaagctgagaaaggcagattacacagcctttaatcttcataatattcatgatatagctattcgcaataccttggcaaaagccatgattgtggcagataatcaggggattcattttagtttggagactgtgggggttgttgaagagctggcattgcctatgttggaggctatccgtatcctctctatcctcacgacaaatgccttggaggcagctagtgagtctgaaaatccgcagattcgggtcgctttgttggcaagtgataggagtgtccgttttatcattgaaaacactcgtaagaaagaagaactgaaccccagcattctcagtcaaaagggttattcgaccaagggaaaccacagcggactgggcttagcgaccttggaggatatggtttttcattatgatttgaacttagatacccaactaggagagacgacttttagacaagatttagaattgccatttaaggatgagaaacgaggtggagaggaatgagaattttagttttggaagatgatagagtccagcagggacggatagagcagactttactagatatcggtcgctctcgcaatttgagattggaaattgatattgccaaaaactatggggatgttgaaaagtattctcagtattttgatcattaccagctctatttattggatttagagattgatggagagcgtgaacggggctttcaggttgctcaacaggttcgggagcgggatccttttacaagcattgtctttgtgtccacgcattcggaggccttgcctctagcttttcgctatcacttgtctgccttggattttatttctaaggatcaaccagaggaagattaccgtcatcagctggagcgctgtctggactatgtactggcagtggacaagagggaaaatatgcgtctcttcacctatagttttgagggaagacggggctttactctgccctaccatgagattttagcctttgaaacctcagtggaatcccaccgtatcaaggtctattatgccaatcactctatcaagaccatttatggcagtctcaaggatatcgctgccaaggctgaaaaagattactttgtctatgccaatcgcaatactttagtcagtttacaggcaattgaagagatgactgccacagaagtgaccttgttagaaggcttgcatttccccgtatcacgaacagccagaagaacccttaaaaaacatctcaatgtctaatatctgttagacttggatgagtttatcaataagaatgtcggaaaattttctgatattcttatttttttgacttctttttcgaatagataggtaagaggaaaaaggaaaggagcctagttcatgtttatatcaatgttctacccatggttcactgagttattttttaaataaaatttaatttagttgtgtattttcggattatttttcgaataaataagtgagaagaaaaagaaaggaataaaataatgaaagaacattactatggatttgttgagctaacgtcggaagaattgaccgatattcaaggtggagaaaattggacgaagacccttgcagattggtacattggatttcgtagaggtttaggtttttaggaggataagcgatgaatgaaatgactaacgagtatactattgaagtactaaaggaaagcgacttagctttgctggtgggtggtagcaaggaaagttatcaagggggtctaattacaggtctattgttacgtagtgtatttattggaaccccattttttagaagataagatttagaaaaaatagaacaagaggagaaaaggatgacaaattttgacaaaatggaacagaactttgtagctcttacagaagaagagttgatgaatgtggatggaggaattattccgatagcagtagcagctagtattattgcaggttcagcatttgcaggtttgagtgcaggtgtagctattggaattagtcgaaacaagagataaagagagaataaatgaagctttcaaacgaatgtgcggctattattatatcagcctcaggaatagtgggtttattagtaggagtagctattggattagctagtattatttaaaaaggagtatatcatgcaaaatttgaatcaatttgaaatcgtagaccaaaatgaattagagcaagtacaaggtggagtaggtttattgattgttattggaggctcattacttgctgcaggtggagctggagtagcgggttattggctatcgcgtacgtttggttaatatatttaaaggagtaggtaggatatgaaaaaattagaagaaaaatttgaaatcatggcagaagcagatttggctagtaccgagggcggacttattattactacttctacagctatcgcttggggtgttttaggagtcgttacctatatgtacggtcgtcatctaggaagcagacgttaaatttaataatttgatacaaaggatgtaagaaaaactatgaatcgtaacttagaacggtgttatctattctgaccatgaatagatcataccagaggtggcttagaaatagcagggacattaaaaattgaattaactttaaataggatgtcgtaaaggttgctatcaatgatttatttgtcccaagcttgcctagggtgacagtaaaacatcaatttcctttcataccatatttttagtaggtaggacgtttgttctgcctattttttatccaaaaagtgcatttgggaggtagataggcgcatttgggaaggaagtccagtttttgtttggggattggggtaagatagttgttatcagatgagtttatactcttcgaaaatcaaattcaaaccacgtcaacgtcgccttgccgtatatatgtgattgacttcgtcagtcttatatacaacctcaaaacagtgttttgagcagcctgcggctagttttctagtttgctctttgattttcattgagtattaggaaaaaggagatgaatatgaaatttgggaaacgtcactatcgtccgcaagtggatcagatggactgcggtgtagcttcattagccatggtttttggttactatggtagttattattctttggcacacttacgagaattggccaagacgaccatggatgggacgacggctttgggcttggtcaaggtggcagaggagattggttttgagacgcgagcaattaaggcggatatgacgctttttgacttgccagatttgacttttccttttgttgctcatgtgcttaaggaagggaaattgctccactactatgtggtgactgggcaggacaaggatagcattcatattgccgatccagatcctggggtgaaattgaccaaactgccacgtgagcgttttgcggaagaatggacaggagtgactctttttatggcacctagtccagactacaagcctcataaggatcaaaagaatggtctgctctcttttatccctatattagtgaagcagcgtggcttgattgccaatatcgttttggcaacactcttggtaaccttgattaatattgtgggttcttattatctgcagtctatcattgatacctatgtgccagatcagatgcgttcgacgcttgggattatttctattgggctggtgattgtttatattcttcagcagatcttgtcttacgctcaggagtatctcttacttgttttggggcaacgcttatcgattgatgtgattttgtcctatatcaagcatgtttttcacctgcctatgtccttctttgcgacacgcaggacaggggagatcgtgtctcgttttacagatgctaatagtatcattgatgcgctggcttcgaccattctttcgattttcctagatgtgtcaacggttgtcattatttcccttgttttattttcacaaaataccaatctctttttcataaccttattggcacttcctatctatacagtgattatctttgcctttatgaagccgtttgaaaagatgaatcgggataccatggaagccaatgcggttctgtcttcttctatcattgaggacatcaacggtattgagactatcaagtctttgaccagtgaaagtcagcgttaccaaaagattgacaaggaatttgtggattatctgaaaaaatcctttacctatagtcgggcagagagtcagcaaaaggctctgaaaaaagttgcccatctcttactcaatgtcggcattctctggatgggagctgttctggtcatggatggcaagatgagtttggggcagttgattacctataataccttgctggtttactttacaaatcctttggaaaatatcatcaatctgcaaaccaagcttcagacagcacaggttgccaataaccgtctaaatgaagtatatctggtagcttcggagtttgaggagaagaaaacggttgaggatttgagcttgatgaagggagatatgaccttcaagcaggtttcttacaagtatggctatggtcgagacgtcttgttggatatcaatttgaccattccccaaggttctaaggtggcttttgtggggatttcagggtcaggtaagacgaccttggccaagatgatggttaatttttacgacccaagtcaaggggagattagtctgggtggtgtcaatctcaatcagattgataaaaaggccttgcgccagtatatcaactatctgcctcaacagccctatgtctttaacggaacgattttggacaatcttcttttgggagccaaggaggggacgacacaggaagatatcttacgggcggtcgaattggcagagattcgggaggacattgagcgcatgccactgaattaccagacagaattgacttcggatggggcagggatctcaggtggtcaacgtcagagaattgctctggcacgtgctctcttgacagatgcgccggtcttgatcttggatgaggcgaccagcagtttggatattctgacagagaagcgaattgtcgataatcttatggctttagataagaccttgattttcatcgctcaccgcttgaccattgctgagcggacagagaaggttgttgtcttggatcagggcaagattgttgaagaaggaaatcatgctgatttgcttgcacagggtggtttttacgcccatttggtcaatagctagaaagaggagaggatgaaaccagaatttttagaaagtgcggagttttataatcgtcgttaccataatttttccagtcgggtgattgtccccatgttccttctgctcgtgtttttacttggctttgcaactttggcagagaaggagatgagtatgtctactagagctactgtcgagcctagtcgtatccttgcaaatatccagtcaactagcaacaatcgtattcttgtcaatcatttggaagaaagtaagctggttaaaaagggagaactgttggttcaatatcaagaaggggcagagggtgtccaagcggaggcctatgctagtcagctggacatgctcaaggatcaaaaaaagcaattggagtatttgcaaaagagtctgcaagaaggggagaaccactttccagaggaggataaatttggctaccaagccacctttcgtgactacatcagccaagcaggtagtcttagggctagtacatcgcaacaaaatgagaccatcgcgtcccagaatgcagcagctagtcaaacccaagccgaaatcggcaccctcatcagtcaaacagaggctaaaattcgcgattaccagacagctaagtcagctattgaaacaggtgcttccttggccagtcagaatctagcctactctctctaccagtcctacaagtctcagggcgaggaaaatccgcaatctaaggcacaagcagttgtgcagctagaagcacagctttctcagttagaatctagtcttgctacttaccgtgtccagtatgcaggttcaggtacccagcaagcctatgcgtcaggtttaagcagtcaattggagtctctcaaatcacaacacttggctaaggttggtcaggaattgacccttctagaccagaaaattttggaggcagaatcgggtaggaaggtacagggaaatcttttagacaaggggaaaattacggcgagtgaggatggggtgcttcatcttaatcctgagaccagtgattctaccatggtagcagaaggcgccttactagcccaactctatccgtccttggaaaaagaagggaaagtcaaactcacagcttatctaagttcaaaagatgtagcaaggatcaaggtcggtgattctgttcgctatactacgactcatgatgctaagaatcaacttttcctagattctactattacaagtattgatgcgacagctactaagactgaaactgggaatttctttaaaatcgaggcggagactaatctaacttctaagcaggctgcaaaacttcgatatggggtggaaggtcgcctgcagatgattacgggcaggaaaagttacctacgttattatttggatcaatttttgaacaaagagtaatgttcgtgtttttagagttaaataatttttaaactgtgagaaagatttttcttgcagttttttctttatgatttttgaagttactacgttatttattcggttaaattcttgtaattttaggttttttgtggtaaaatgtgctcaagtaatacgaaaggcgaactttaaaatgtcaaaacaattgatctattcgggaaaagctaaagatatctatacaactgaggatgaaaatcttattatttcaacttacaaggaccaggcgactgctttcaatggtgttaagaaggagcagattgcgggcaaaggagtgttgaataatcagatttcatcttttatttttgagaaattaaatgcggctggtgtggcgactcactttgtggagaaactttcagatacagaacaactcaataaaaaggttgagattattcctctcgaggttgtgcttcgcaactacacggctggttccttttcaaaacgttttggtgtagacgaaggaatcgcatttgagactccgattgtcgaattttactacaaaaatgatgatttggatgatccattcatcaatgatgagcatgtgaaattcctacagattgcggatgaccagcagattgcctacttgaaggaagaaacgcgtcgtatcaatgaacttttgaaaggctggtttgctgagattgggcttaagttgattgactttaagctagagttcggttttgacaaggatggcaagattatcttggcagatgaattttcaccagataattgccgtttgtgggatgcagatggcaaccacatggataaggatgttttccgtaggggactaggtgaattaaccgatgtttatgaagttgtttgggagaagctgcaaggtttgaaataatctgtttgcaacggaaaaccttcgtctctcaactaaaaggactcaggctgaaaaggtcccccagaccttttcactccgtaggggattgggagaactaacagatgtttacgagattgtctgggaaaagttgcagggtttgaaataacaacctcaaggtcgttggaacattgtaaaagctgaaataaaggaataaggattgatggataaacgtatttttgttgaaaaaaaggctgattttcaggtcaagtcagagagtttggtgagagaactccagcacaacttgggactttcaagcttgaaaagtattcgcatcgtgcaagtgtatgatgtatttgacttggcagaggacctgtttgcacctgcagagaaacacatcttctctgagcaggtgacagaccatgtcttggatgaagctgctgtacaggcggatcttgctaactatgctttctttgccattgaaagcctgccaggtcaatttgaccagcgtgcagcatcttcacaggaagccttgcttttactaggaagttcgagtgatgtaacggttaatactgctcaactttatttggtcaataaagatattgatgcgacggagttagaggcggtcaagaactatctgctcaacccagttgattctcgtttcaaggacatcacgacagggattgccaagcaggaattttctgagtcagacaagaccattcctaaattgactttctttgaaagctatacagcagaagactttgccctctacaagaccgagcagggcatggcaatggaagtggatgatttgctctttatccaagaatatttcaagtcaatcgggcgcgtgccaactgagacagagctcaaggttttggatacttactggtctgaccactgccgtcacacaacttttgagacagagttgaaacacatcgacttttcagcttctaaatttcaaaagcaattgcagtcaacctatgacaagtatattgccatgcgtgatgagttggggcgttctgaaaaacctcaaaccttgatggatatggcgactattttcggtcgttatgagcgtgctaatggacgtttggatgatatggaagtgtcagacgaaatcaatgcttgctcagtagaaatcgaagtggatattgatggtgtgaaagagccatggctcctcatgttcaagaatgaaactcacaaccacccaacggaaattgagccatttggtggggctgctacctgtatcggtggagccattcgtgacccattgtcaggtcgctcatatgtttaccaagccatgcggatctcaggtgctggtgatattacagcaccgatttcagaaactcgcgctgggaaattgccacaacaggtcatttctaagacagcggctcatggttattcttcatacggtaaccaaattgggcttgcgacgacctacgttcgtgagtatttccacccaggctttgtagctaaacgtatggagctaggtgccgttgttggtgctgctcccaagggcaatgtagtccgtgaaaaaccagaagcaggtgacgtgattatcttgctaggtggtaagactgggcgtgatggtgtcggtggtgcgacagggtcttctaaggttcaaacagttgagtccgtggaaactgccggtgctgaggttcaaaaagggaatgccatcgaagaacgcaagattcagcgccttttccgtaatggcgatgtcactcgtcttatcaagaagtccaatgactttggagcaggtggtgtctgtgtagccatcggtgaattggcagacggtcttgaaattgacctcaacaaggtgcctcttaaataccagggcttgaatggtaccgaaattgccatctctgaatctcaagaacggatggcagtcgtggttcgtcctgaggatgtagatgccttcgttgcggaatgtaacaaagagaatattgatgctgttgtggttgcgacagtgactgaaaaaccaaatctagtcatgcactggaatggtgaaacgattgtcgacttggaacgtcgtttcctagataccaacggtgtgcgtgtcgttgttgatgccaaggttgtggacaaagatgtcaagcttccagaagaacgtcaaacatctgctgacacacttgaagcagatacccttacggtcctatctgacctcaaccatgcgagtcaaaaaggattgcagactatctttgattgctctgttggtcgttcaacagtcaatcacccacttggcggacgctaccaactcacaccaactgaggcatctgtgcagaaattaccagttcaacacggtgtgactcatactgcgtcagtcatggctcaaggtttcaacccatatgtagctgaatggtctccataccacggtgctgcctatgcggtgatcgaagcaactgctcgtttggttgctgctggtgccaactggtctcaggctcgtttctcttaccaagagtacttcgagcgcatggataaacaagcagagcgttttggtcagccagtagcagctctcctaggctctatcgaggcacaaattcagcttggtttgccatctatcggtggtaaggactccatgtctggtacctttgaagaattgacagtgccaccaaccttggtcgcttttggggtgacgacagcagatagccgtaaggtgctttcgccagagttcaagaatgctggtgaaaacatctactacatcccaggccaagcactctcagcagagattgattttgacttgattaagtctaactttgctcagtttgaagcccttcaaaaggctcacaaagtaacagcagcttcagctgttaaatacggtggtgttattgaaagtttggcacttgctacttttggaaatcatatcggtgcagaggtgatcttgcctgaacttgaaacagctttgacagctcaattaggcggatttgtcctaacatctcctgaagaaatcgctggagtagagaagattggacaaacaagtgccaactttacactccttgtcaacggtgtgaagctagatggacacaaacttgacagtgctttccaagggaaattggaagaagtttacccaacagaatttgcacaagctaaagaactagcagaagttccagctgtcgctactaacacagtcatccaagctaaagaaaaagttgaaaaaccggtagtctatatcccagtcttcccaggaactaactcagaatatgactcagccaaggccttcgaaaaagaaggtgcagaggtcaacttggtgccatttgtgaccttgaatgaagaagccattgtcaattcagttgaaactatggttgacaacatcggcaaggctaacattctcttctttgcaggtggtttctcagctgcggacgagccagatggttcagctaagtttattgtcaatatcctgctcaatgaaaaagtgcgtgcagctattgatagctttatcgcccgtggtggcttgattattggtatctgtaatggattccaggccttggtcaaatcaggtcttcttccatacgggaacttcgaagatgccagcagtactagtccaaccctcttctacaatgatgccaaccagcacgtggccaagatggtggaaactcggattgccaataccaactcgccatggttggctggagtagaagtgggcgatatccacgctattcctgtttcgcacggtgaagggaagtttgtcgtgacggctgaggaatttgcggagctccgtgacaatggtcaaatctttagccaatacgttgactttgacggcaaaccaagtatggactctaagtacaatccgaatggttctgtccatgccatcgaaggaattaccagcaagaatggtcaaatcatcggtaagatgggccactcagaacgttatgaggaaggtcttttccaaaatatcccaggaaataaagaccagcacctgttcgcgtcagcggttaaatactttactggaaaataagacttacagattttctaatagatagtatcagtaatgtaaaagtcatgtagatttagctcttggtgctacacaaataaaaattaggtatataaaatgacatacgaagtaaaatctcttaatgaagaatgtggtgttttcggtatctggggacatccagatgctgctaaattgacctattttggtctccatagtcttcagcaccgtggtcaggagggggcaggaatcctctccaacgatcagggacaattgaagcgccatcgtgacatgggacttttatcagaagtcttcagaaatcctgctaatttggataaattgacgggaactggtgcgattgggcatgtgcgttacgcgactgctggcgaagcttctgtagataatatccagcccttcctcttccgttttcatgatatgcagtttggtttggctcataatggaaatctgaccaatgcagcctctctcaagaaagaattggaacaaagaggagcaattttcagcgcgacttcggactcggaaatcttggctcatctcattcgtcgtagtcacaatccgaacttaatgggaaaaatcaaggaggcgctcagccttgtcaaaggtggttttgcctatatcttgctgtttgaggacaagttgattgcggctcttgaccccaatggtttccgtccgctttctatcgggaaaatggccaacggagcggtggttgtttcatctgaaacctgtgcttttgaggttattggtgctgaatggattcgtgatttgaagccaggtgagattgtgattattgatgacaagggaatccagtatgatagctatacggatgatactcagctcgcgatttgctctatggagtatatctattttgcccgccctgattctaatatccacggtgtcaatgtccatacggctcgcaaacgtatgggtgcccaattggcgcgtgaattcaagcacgaggcggatatcgtggtcggtgtgcccaattcttccctcagcgcggctatgggctttgcggaagagtccgggctaccaaatgaaatgggcctcatcaagaaccaatacacccaacgtacctttatccaacccactcaagaattgcgggagcaaggggtgcggatgaaactgtctgctgtttcaggcgttgtaaaaggcaagcgtgtggttatgattgatgactctattgtacgtggaacgacctctcgtcgtattgttcaactcttaaaagaagcgggtgcaactgaggttcacgttgctattggcagtccagcgctagcttatccatgcttctacgggattgatatccagacccgtcaggagctgattgcggctaatcatacggtcgaagaaacgcgtcaaatcattggggcggacagtctgacttatctttctgttgaggggttgattgattcaattggtattgaaacggatgcgccaaatggtggtctctgtgtcgcttactttgacggtgactacccaacacctctctacgactatgaagaagactatcgtcgaagtttggaagaaaagaccagtttttacaaatagacaatagatcctccattaaagaaaaggaatataaaaatgcttatgccccacgtctcactactgactaaaaactaaagcatttgtcagtagaggctttctcctatgggacaaaagctagagacctgactagtatttttagataaaataattgtttatctaaaaatacgtcgcagtctttcccaaaaaaagaaaaggaaaaataaaatggcaaataaaaatgcgtacgctcaatctggtgtggatgttgaagcgggttatgaagttgttgaacggattaaaaagcacgtggctcgtacggagcgtgcaggtgtcatgggagctctgggtggctttggtggtatgtttgacctttcaaagactggggttaaagaacctgtcttgatttcaggaactgacggtgtcggaaccaaactcatgctggctatcaagtacgacaagcacgataccatcggtcaggactgtgtggccatgtgtgtcaatgatatcatcgctgcaggtgcggagcccctctatttccttgactacgtcgcaactggcaagaatgaaccagctaagctagagcaagtcgttgctggtgtggcagaaggttgtgtgcaggctggtgctgccctcattggtggggaaacggctgaaatgcctggcatgtacggcgaagatgactatgacttggctggttttgcggtcggtgtggctgaaaaatctcaaatcattgacggttcaaaagtggcagagggagatgttcttctcggacttgcttcaagtgggattcattccaatggttactctctcgtccgtcgtgtctttgcggattacacaggtgaggaagtcctgccagaattggaaggcaagcaactcaaggaagttcttcttgagccgactcgtatctatgtcaagggtgtcttaccactcatcaaggaagagttggtcaacggcattgcccacatcactggtggtggttttatcgaaaatgtccctcgtatgtttgcagctgacttggctgctgagattgaggaagacaaggttccagttttaccgattttcaaagcccttgaaaaatacggtcagatcaaacacgaagaaatgtttgaaatcttcaatatgggtgtgggacttatgctagcagttagccctgaaaatgtaagtcgtgtcaaggaattgttggatgaaccagtctatgaaattggtcgtatcgtcaagaaagaaaacgaaagtgtcatcatcaaatgaaaaaaatagcggtttttgcctccggtaatggctcaaattttcaggtgatagcggaacaatttccagtagagtttgtcttttcagaccatcgtgacgcctatgtgctcgaacgtgcagataagctcggcgttctgtcctatgcttttgaactcaaggagtttgagagcaaggcagactacgaagcggcccttgtcgaactcttggaagaacaccagattgacctggtttgtctagcaggctacatgaaaatcgttgggccaaccttattggcgacttatgaaggccgaatcatcaacattcatccagcctacctgccagaatttccaggagctcatgggattgaggacgcttggaatgctgacgttgcagagagcggcgtgaccattcactgggtagattctggtgtggacactggtaaaatcattaaacaagtccgtgtgccaaggttagctgatgataacattgaaagctttgaaactcgcattcatgaggcagagtacaagttgtatccagaggttattagagaattgttggacaagtaaatgaaaaaatgggtggaaacacttgccttgattaccttggtaatcattctacgtttactggtaaattttttcttcccagagattccctattgggggagatttttactgacagtaattttgggagtcttggtaatcgtctccctatattttatgaatcgaaaaatgcgtaggtaaagagtttgaaaatgaaaggaaaaaacatgactaaacgcgccttaatcagcgtctcagacaaagcgggcattgttgaatttgcccaagaacttaaaaaacttggttgggagattatctcgacaggtggaaccaaggttgcccttgataatgctggggtgaacaccattgcgatcgatgatgtgacgggcttcccagagatgatggacggtcgtgtcaagacccttcatccaaatatccacggtggactcctcgctcgtcgtgacttggatagtcacctggaagcggctaaagataataagattgaattgattgaccttgtcgtggtcaatctctatcctttcaaggaaaccatcctcaaaccagacgtgacttatgctgatgcggtggagaatatcgatatcggcgggccatctatgcttcgttcagcagcgaagaaccatgccagcgtgacggttgtggtagaccctgctgactatacagtggttttggacgagttgtcagccaatggtaaaacgacttacgaaacgcgtcaacgtttggcagccaaggttttccgtcacacagcggcttatgacgccttgattgcagagtatttcacagctcaagtcggcgaaagcaaacctgaaaagctcactttgacctatgacctcaaacaagccatgcgttacggtgagaaccctcaacaagacgcagacttctaccaaaaagctttgccaacagactattcgattgcttcagcgaaacagctcaatgggaaagaattgtcattcaataatatccgcgatgctgatgctgccattcgtattatccgtgatttcaaagaccgtccaaccgttgtggctctcaaacacatgaacccatgtggaatcggtcaggctgatgacatcgagactgcttgggactacgcttatgagtctgacccagtgtctatctttggtggtatcgttgttcttaaccgtgaggtggatgctgcgacagctgagaagatgcacggcgttttccttgaaatcatcatcgcaccaagctatacggatgaggcgctagccattttgaccaacaaaaagaaaaacttgcgtatccttgccttgccatttgacgctcaagaggctagcgaagtggaagcagaatatacaggtgtagttggtggtctccttgtgcaaaaccaagacgtagtgaaagaaagcccagctgattggcaagtggtgactaaacgccagccaacagagacagaagcgactgctcttgagtttgcatggaagtctatcaagtatgtcaaatcaaacggcatcatcgtgaccaacgaccatatgacacttggtgttggcccaggtcaaaccaaccgtttggcttctgttcgcatcgctattgaccaagctaaagaccgtcttgacggcgctgtgcttgcttccgatgccttcttcccatttgcggataacgtggaagaaatcgccaaagcaggcattaaagctatcatccagccaggtgggtccgtccgtgatcaggaatccatcgaagctgctgacaaatacggcttgactatggtcttcacaggagtgagacattttagacattaagaacgttaaagggaagaaaacagtttctttcctttttttgctttaaaagcgaaacgaaacaagattaaaacgaacgtttatggtataatattagtaaataattcgcaaaagaggttgaaagatgaagctgttagttgtcggttcgggtggtcgtgaacatgccattgctaagaagttgcttgagtcaaaagaggtagaaaaggtttttgttgctcctggaaatgatgggatgactctggatggtctggaattggtaaatatctctatttccgaacattttaaattgattgactttgcaaaggccaacgatattgcttggtcatttatcgggccagatgacgcccttgcggctggtatcgtggatgatttccatgcagctggtctcaaagcctttggtccgactaaggctgcggctgaacttgagtggtctaaggattttgccaaggaaatcatggttaaatacggcgttccgacagcagcctatggcacattctcagatttcgaggaagctaaggcctatatcgaaaagcagggtgcgcctatcgtagtcaaggcggatggcttggcgcttgggaagggtgtcgtcgttgctgagacagtcgagcaagcggtcgaagccgctcatgagatgcttttggacaataaatttggtgactcaggtgcgcgtgtggttattgaggaattccttgaaggagaggaattttcactctttgcctttgtcaatggtgataagttctacatcatgccaacggctcaggaccacaaacgtgcctacgatggcgacaaagggcctaacacgggaggtatgggagcatatgcgccagttccacacttaccacagagtgtggttgatacagcggttgacaccattgtcaagccagtccttgatggcatgattaaagaagggcgcccttatctgggtatcctttacgcaggacttatcttgacagctgatggacctaaggtcatcgagtttaatgctcgcttcggagatccagaaactcagattatcttgcctcgtctgacctctgattttgcccaaaatattacggatatcctcgatggcaaggagccaaacatcacctggacggacaagggtgtgacgcttggtgtagttgtcgcatcaaacggttacccgctagaatatgaaaagggtgttgcattaccggcaaaaaccgagggagatatcatcacctactatgcaggggctaagttttcggaaaatagtagagcgctgctatcaaacggcggacgtgtctatatgctcgtcaccacagcagccaccgtcaaagaagcccaggacaccatctaccaagaattcgcccaacaaaaaacagaaggcctcttctaccgaacagatatcggaagtaaagctattcgataaaggtataagaaaaaagcgatgcagtcgtcaagtacgttaatagtcgtttgatttgcgagcgttagcgagctaatatagaacaatcaccgctgttgtgcaagaacgattgaatgacaatacaatcgttcagggaaattggaagaccttgggcttccgatttaggcatgagacacctttggtggctgctgccgtccctcacaacctaaggtgattgaaaaaagaaaggaaagaaaaggaaaatcatgaccaaaccaattatttccatcatcatgggctcaaaatccgactgggaaaccatgcaaaaaacagcagaagtcctagaccgcttcggtgtagcctacgaaaagaaagttgtctctgcccaccgtacaccagaccttatgttcaagcatgccgaagaagcgcgtagtcgtggtatcaaggtcatcatcgcaggtgcaggtggcgcagctcatttgccaggtatggtcgcagctaaaacaacccttccagtcattggtgtgcccgtaaaatcgcgtgcccttagtggtgtggactcgctctactctatcgtccagatgccaggtggagtgcctgtcgcaactatggctatcggtgaagcaggtgcgaccaatgcggctctcttcgcccttcgtctcctatcagtagaggatcagtctatcgcgacagcactggcagatttcgcagaggagcaaggaaaaatcgcagaggagtcgacaaatgagctcatctaaaacaatcggaattatcggtggcggccagctgggtcagatgatggctatctctgctatctacatggggcacaaggttgtagcgctggatcctgcggcagattgcccggcctcttgcgtggcggaaatcatcgtggcgccttataatgacgtggatgctctgcgtcagttggctgagcgttgcgatgtcctcacctatgagtttgaaaatgtcgatgctgacggtttggatgcggttatcaaggatggacaactccctcaagggacagatctgctccgcatttcccaaaatcgcatttttgaaaaggactttctttcaaacaaggctcaagtcactgtagcaccctacaaggttgtgacttcaagccaagacttagcagatatcaacttgtcgaaaaactatgttctcaagactgcgacaggtggctacgatgggcatgggcaaaaggtcattcgctcagaagcagacttggaagaagcctatacactagcagattcaacagactgtgtcttggaagaatttgtcaactttgaccttgaaatttctgttatcgtgtcaggaaatggcaaggacgtgacggttttcccagttcaggaaaatatccaccgaaacaacattctttcaaaaaccattgtgccagcccgtatttcagaaagtctagctgaaaaagcaaaagccatggcagtgaagattgctgaacagcttaacctgtctggaaccctctgtgtggaaatgtttgcgacggctgatgacatcattgtcaatgagattgccccgcgtccacacaattcaggacactactcaatcgaagcctgcgacttttcacaatttgacactcatattcttggtgttctcggagcaccattaccagccatcaaactgcatgccccagctatcatgctcaatgttctcggccaacatgtcgatgctgctgaaaaatatgtcacagaaaatccaagcgcccacctccacatgtatggtaaaatagaagcgaagcacaaccgcaagatggggcatgtgactttgtttagtgatgcgccggatgaggtggaggaatttgggaaagggattgatttttagtacaagtctatgatacaaattatcgttaatgcatttattgaaaaggataagactggagcagtcgttgaagtcttgtatgctagtagtgatcacgaaaaggtaaaggctaaatatgaagagctagttgctctatatcctgaaaactatttagcaatttatgatttaccattggataccgatctcaatgaattactacactatccatctgtgtttattgggaaagaggagtttgagtagaaatcttgctttacctagatagcttattcccagcagtttaagaagaaaggaaaaattaacaacatgatcgaccgttactctcgccctgagatggcgaatatttggagtgaagaaaataaataccgtgcttggcttgaggtggaaatcttggctgacgaggcatgggctgagttgggggaaatccctaaggaagatgtagctttgattcgtgaaaaagcggactttgacatcgaccgtattttggagattgagcaggagacgcgtcacgatgtggtggctttcacgcgtgcagtttctgagacgcttggtgaagagcgtaagtgggtccactatggtttgacttctaccgacgtggtggatacggcctacggttatctttacaagcaggccaacgacatcatccgtcgtgaccttgaaaacttcaccaacatcatcgctgataaggctaaggagcacaagtttaccatcatgatggggcgtacccacggtgtgcacgctgagcctacaacctttggtctgaaattggcgacttggtacagcgaaatgaagcgcaacatcgagcgtttcgagcatgcggctgctggtgtggaagctggtaagatttctggtgcggttgggaactttgccaacatcccaccattcgttgagcaatatgtctgcgataaactgggtattcgtgcccaagaaatctctacacaggtgcttcctcgtgaccttcacgctgagtactttgcagttcttgctagcattgcgacttctatcgaacgtatggcgactgagattcgtggtttgcaaaaatcagaacaacgtgaagtggaagaattctttgctaaagggcaaaaaggttcatctgcaatgcctcacaaacgcaaccctatcggttctgagaacatgacaggtctagcgcgtgttatccgtggtcacatgattactgcctatgagaacgtagctctctggcacgaacgtgatatctctcactcatcagctgagcgcatcattacaccagatacgactattttgattgactacatgctcaaccgttttggaaatattgtcaagaatttgacagtcttcccagaaaacatgatccgcaacatgaactcgacttttggtttgattttcagtcaacgtgctatgttgaccttgattgaaaaaggaatgacccgtgagcaagcctatgacttggtacaaccaaaaacagcctactcttgggacaatcaagtagactttaaaccacttcttgaagcagatccagaggtaacttctcgcctcactcaagaagaaatcgatgaaatcttcaaccctctttattacaccaaacgagtggatgatatctttgaccgtcttggtttaggataattagaataaaaatcgaagttctattactctatttataggagtagaagaacttcgatttttattttgtcttcaagtatttttgataaaaattacctatattttagtaaaatttaaacaaatttagtctatcttaatttacatatagaaaatacatttttaatgtcatataataagcatagaaaaagcccaagcaaggcttaggctttcttcttagtgatcacggtcacatgaaatgaatttgattttgtagtaatctgcgcgtttatatgtttcgctgtatgcaagaacttgaccagtagactctagtttagtagtcttggtttgtaaaacggttgggaattgttcatcgactccgaggattgaagccgcatgttctggagttggaaatgctatttcattgatttcttcaaaatgttcatcattcatgtgaatgtggtaatccaatttgaaacggttatagatagagctataatattcaagatttggataatttgcgttgatgtattgttctgggatataagatgtatggtagatgtacacaacaccacccgtttcgcgaacgcgttcaatcttgtagtagaactgatctccgcgtagtccaagtttttctaagtagcttagtttgtttccacgctcaatagaaaggacggtaactttatcatctttagtttcaaaaacttctacatctgaaaactctacgagtttgtgtttgcgtgcgcgtgaaacgaatgtaccctttccttgttgacggacaatatagccatccttggcaaggtcgtttaaagcgcgaacaactgtgatagaactaacatcatacattgcaatcaattcagcttcagtgtagaatttatctccactggcaaattgaccagaaatgattttgttctttaattcatctttaatatattgatactttggaattgccatattttcacctcgattttccttctccgttaaagattttaccataaaactggaaagaatagtagccttttgaataaaaaaattagaataataggctataaggttaatttacataggaataaatagaaaaatctacatttttatacatggtactaaaatgttgttatgactataaattacaagatttttataagttttttgtgtaaaatttagtgaaaaatgaaaaaaattgtgaaaacctattgacaaatgtaagatattgagatatatttactatatcaacaaatgaaagcgtaaactttattgtcagaaggtaagaatatgacacgatttgagatacgggatgatttttatctcgatggaaaatcatttaagattttatctggcgccattcattattttagggttcctccagaagattggtatcattcgctctataacttgaaggctcttggttttaatacagtagagacttatgtggcctggaatttacacgagcctcgtgagggtgagtttcactttgaaggagctctggatttggagcgatttcttcagacagcacaagatttgggtctctacgctatcgttcgtccgtcgcccttcatctgtgcggagtgggaattcggtggtttaccagcttggcttttaaccaaagatatgaggcttcgttcctcagatcctgcttatattgaagctgtcggtcgctactatgaccagctcttgtcacgattggttccacatttgttggacaagggtggcaatatccttatgatgcaagttgaaaatgagtatggttcttatggagaagataaggcttatctgagagccattcgacagttgatggaagagcgtggcgtaacctgtcccctctttacatcagatggtccatggagagctactctgaaagctggaaccttaatcgaagatgacctctttgtaacaggaaactttggttctaaagctccgtacaacttttcacagatgcaggaattctttgatgaacatggcaagaaatggccgctcatgtgtatggagttctgggatggatggttcaatcgttggaaagagccgattatcacacgggatccgaaagagttggcagatgcagttcgagaggttttggaacaaggctctatcaatctctacatgttccatggtggtacaaactttggtttcatgaatggttgctcagctcgagggactttggacctgccacaagttacatcttatgattacgatgcccttctggatgaagaaggaaatccaactgccaaatatttggcagtcaagaagatgatggcaacacatttcccagagtatccccagttggaaccactctacaaagagagtatggagttggatgctattccactagttgaaaaagtttccttgtttgaaaccttggatagcttgtcaagtcctgtagaaagcctctatcctaaaaagatggaggagttgggacaaagttatggctacctactctatcgaacagaaacaaactgggatgcagaagaagaacgccttcgcatcatcgatggacgtgaccgtgctcaactctttgtagatggtcaacgaattgcaactcaataccagacggagattggagaagatatctattgtcaaggtaatcgaaaaggttcttcacaacttgacatcttgattgaaaatatgggccgtgttaactatggacataagttcttagctgacacacaacgtaaaggaatccgaacaggtgtctgcaaggatttacacttcttacttaattggaaacaatatccactaccactggataatcctgagaaaattgatttttcaaaaggatggacagaaggacaaccagccttttacgcttatgactttacagtccaagagccaaaagatacttacctagacttatctgagtttggtaagggagttgcctttgtcaatgggcgtcacctaggacgtttttggaacgtcggcccgaccctctcgctttatattcctcatagctacctcaaggaaggtgcaaaccgcatcattatctttgagacagagggtgaatataaagaagagatttatttaactcgtaaacctacactaaaacatataaagggggaaaacttatgacaattgtaggatgccgtatcgatggacgtttgatccacggacaagtagccaatctttgggctggaaaactaaatgtttcacgtattatggttgtagatgacgaagttgtcaacaacgacgttgaaaagagtggtttgaaactagcgacaccaccaggtgtgaaattgagtattttgccaattgaaaaagcggcagccaatattcttgctggtaaatatgatagccaacgtctctttatcgtggctcgtaaaccagaccgcttccttggtttggtcgaagcaggtgtaccacttgaaacccttaatgttgggaatatgtctcaaacaccagaaactcgttctattacacgttctattaacgtagtagacaaggatgtggaagatttccgcaaactagcagaaaaaggtgttaaattaactgctcaaatggttccaaatgatccagtttcagactttttgagtttattaaaataggaaaaaatttttaggaggtcattgttatgatacaatggtggcaaattttacttctcactttgtactcagcttatcaaatctgtgatgagttgacgatcgtttcatctgcaggttcccctgtatttgctggttttattactggtttaatcatgggagatgtgactactggtctacttatcggtggtaacttgcagctattcgttcttggggttggtaccttcggtggtgcttctcgtatcgacgcaacttctggtgcggttcttgcaacagccttctctgtttcacaaggtatcgataccgcacttgcgattacaacaatcgctgtgccagtagcagctctcttgacttacttcgacgttcttggacgtatgacaactactttcttcgctcaccgtgtggatgctgcgatcgaacgctttgactataaaggtattgaacgcaactacttgcttggtgcgattccttgggctttatctcgtgcacttccagtcttctttgctcttgcctttggtggtgcctttgttcaaggagtagtagacttggttaaacaataccaatgggttgcagatggcttgacacttgcaggacgtatgcttccaggtcttggatttgcgatcttgcttcgttaccttccagttaaacgtaaccttcactaccttgctatgggatttggtttgacagctatgttgactgtactttactcaaacgtaacaagtcttggtggcgctgttgctggtatccttggtactcttcctgctgatgttgctgaaaagattggctttgctaacaacttcaaaggtttgtctatgatcggtatctctatcgtaggtatcttccttgcagttgttcactttaagaacagccaaaaagtagctgtagcagcaccttctacaccatcagaaagtggggaaatcgaagatgacgaattctaattacaaacttacaaaagaagattttaatcaaatcaacaaacgtagcttgtttactttccaattaggttggaactacgaacgtatgcaagcttctggttacctttacatgatcttgcctcaattgcgtaaaatgtatggggatggaactcctgaattgaaagaaatgatgaaagttcatactcaattcttcaatacttctccattcttccacacaattatcgctggttttgaccttgccatggaagaaaaagatggtgtaggttcaaaagatgctgttaacggtatcaagacaggtttgatgggaccatttgctcctcttggagacacaatctttggttcacttgtacctgctatcatgggatctatcgcagcaactatggctatcgctggccaaccatggggtatcttcctttggatcgcagttgcagttgcttatgacatcttccgttggaaacaattggaatttgcctacaaagaaggggttaaccttatcaacaacatgcaaagtactttgacagctttgattgatgctgcttctgtacttggtgtcttcatgatgggtgctcttgtagcaacaatgatcaactttgagatttcttacaaattgccaatcggtgaaaaattgattgacttccaagacatcttgaactcaatcttcccacgcttgcttccagcaatctttactgcctttatcttctggttgcttggtaagaaaggtatgaactctactaaagcgatcggtatcattatcgttcttgcagtaggtctttcattcatcggtaaattcttgcttggaatgggcgcataatttatggtgaaatcgttaattttggtgagtcatggtcgtttctgtgaggagcttaaaggcagcacagaaatgattatgggcccacaagataacattcatgcagtggctcttcttccagaagatggcccagaagaatttactgcaaaatttgaagcagctattgaaggtttggatgatttcctagtctttgcggatcttctcggtggaacaccatgtaacgtggtaagccgtttgattatggaaggtcgtgacatcgaactttacgcagggatgaatcttccaatggtgattgaatttatcaatgcgagccttacaggtgcagatgcggactataagaaccgtgctgcagaaagcattgtgaaagttaatgacctgttagctggcttcgatgatgacgaagatgaataagatgtgacaacgtgaaaatcagagggaaaataggcgataggaggatggagcgattctccgacgataatcgatctttttcccaaagattttagttggaactcgattcaataagatgtgataacgtgaaaatcgttagagcattttatatagaatatacatgggaatggggcttactcccattcccatatttaatagaaaaagaggaactcaatgctacattatacaaaaggagatttgctcgaattgggtgcagaaatcactacacgtgaaatctaccaacaaccagatgtatggagagaagcttttgaatcttatcaagcaaaacgtgaagaaattgcagccttcctgcaagggattgctgataaacatgactatatcaaggtaatcttgacaggtgctgggacttctgcttatgtgggagataccttggtaccatactttaaggaagcctatgacgaacgcaaatggaatttcaatgccattgcgacaactgatatcgttgccaatccagaaacttatttgaaaaaagatgtggtaactgtccttgtatcttttgctcgtagtgggaactcacctgaaagtgtggcgactgttgaattggccaaagccttggtggatgagctttatcaagtgacgattacttgtgctgcagatgggaaattggctcttcaagctcatggagatgaccgcaatctcttgcttttgcaaccagctgcttctaatgatgctggctttgccatgacctctagctttacgtctatgatgttgacagctctcttagtctttgatcctacagaatttgctgttaagtctgaacgttttgaagttgtatctagtcttgcccgtaaaattctaggcaatgcagaagatgtcaaagaacttgttgacctagactttaaccgtgtcatctatctaggcgctggtcctttctttggacttgctcatgaagctcagctcaagattttggaactgactgctggtcaagttgcgactatgtatgaaagcccagttggcttccgtcacggtccaaaatctcttatcaacgaagatacagttgttttggtctttggtacaacaacagactacactcgcaagtacgacttggatttggttcgtgaagttgctggtgaccagattgctcgccgtgttgtgcttttgagtgatcaagcctttggtcttgcaaatgtcaaagaagtggcccttggttgtggcggtgtcttgaatgatatttaccgtgtcttcccttacatcgtttatgcccaactctttgccctattgacttcactcaaggtagaaaacaaaccagatacaccgtctcctacaggtacagtaaaccgtgtggtacagggtgttatcatccacgaatatcaaaagtaatactcttcgaaaatcaaattcaaaccacgtcagcttcgccttgccgtactcaagtacagcctgtggctagctttctagtttgctctttgattttcattgagtataagacagtatttatgaattcttgataagaggatttgtaaatcatacaagtaaaccatagattgtgaatggactttctatggtttgtttgcttaatagaattaggaagaaggaaaaacgaatgaaagcatacacagagcgtgtgttcggaagagttgatgaacaagatgtcctagcttattgctttgagactgatgctggttatcaattagaggttatgacttatggggcgactatcttgcgctatgtaacacctgacaagactggaaattttgccaatgttatcttgggattggatgactttgacagctatgtaggcaatagccccaagcatggagctagcgtaggtcctgtggcaggccgtattgcaggtgcgacctttgagcttaatggcaagaactatgaccttgaagtcaacaatgctagcaattgtaaccatagtggttcaacaggttgggattccagcttgtttgaagttgaagaagtaagcgatcatggcctgaccctctacacagagcgtacagatgggacaggaggatttcctgggaatctcaagatttggatcagttaccacttggaagaaactggtgcctatgaaatcagctacaaggtaacgacagatcaggatacgctggtcaatccaaccaatcacagctatttcaacttgtctggtgatttcacgcagacgattgaccgccatgtcttccaactaaacacagagggcatttatccaatcgctccagatggagttcctgccaaaactccagatgctactcgtgatgtggttaaacacatctacaatggtgccttgttgaaggatatctttgcagaggacgatgagcaaatccagctggtatcaggtttggatcatccgtttgcccttcctgcaggtcatgacaatgctggattcctttatgaccaaaattcaggtcgcttcctgcttttcaagacagaggcttcttgttttgtagtctacacagcaaactttgtggatgaaagtgtcatcataggaggtcagccaatggtacagcacaatgggattgcccttgaagcgcaggctttaccagatgccattcacagtgacctcaaagaccaagtcattctcaaagcaggtcaaacctttacaagcaagacacgttatgagcttgttgtgaaataaaaggataggaatttctacttttttgggaatagtatttaccttataacattagtagaaatgggcaaagaataggaaaatatgatataatttaatattgaaaatacctgtcctatctaaaggataaaaggagaaaaaaatgaagaaaattgtatttgctagcgccttggctttgactttagctggagcagttttgacaaatgatgtttttgccaatgacagacttgtggcaacacaatctgcagatggtagaaatgaaaatgtcttgagttcagaagtgcttaaccctgctagtggcaatgttttggttggattaaagggagaatttttgactccagaccaacaagctatcttagatgccatcaatgctatccgtaaagaggcagctgacgaaggtttggtagataagtatgtccctatcaaatggtcgactgacctagaaaaggcagcttttgccagagctgcagaagcttctgtaaccatggaccatactcgtctttctggtaaagaaatctggagcgccttcccatcaggaaacagtgtactaggagaaaacttgggttggaaccatgatggttttctaaaagctcttgaacaatggcgtgctgaaaaagcagactacgtgaagaaaaaatcaggtgattcagcaaaaggtggctctggtcattatgaaactttgattagccctaaatttacacatatggggattgctgcctttaagaatccaaacaacccatataatgccgtaacgattgctcaggcttttggtgatgctgctacttcagaagaattggtaggcagttacggtccggctatccagtatgcagaagtgacttcatctaacttgtcaacagttaaaaataaagcagtcgtagttgaaaaagcgctgaaagaatttagaacttctagttcagaccaatctggttgggtgaaaacagatggaaaatggtatttctatgagtctggtgatctgaagacaggctgggtgaaaacaggtggtaaatggtactacttggatgacctaggtgtcatgcagacaggatttgtaaaagtagatggtagctggtattacttgagtagctcaggtgctatgtttacaggctggggtacagacggaaatagatggttctactttgatggctcaggagctatgaagacaggctggctcaaagaaaatggaatctggtactaccttgatgcgtctggtatcatgaagacaggttggtttaaagttggccaatactggtattatgcatatggctctggagctttggcagtcagcacaacaacaccagacggttataaagtaaatggcaacggtgaatgggtaaactagaaactaaagagttgctttcataactttagataatctatatttgttactataattttaaagatggagagaagaaatagtgcttctcttcattttttgttgacagtttatttctgaaaaatcgtaaagtaagtgtggtgggaagttcgtcttagctttttcaaatcagttaattacttagttacttgatttttcccatccgttcaattgtatatctatccctagaatcttttaaaaagttgatgtataatggaaagagttgtatattttacaataaattaacatactaatttaaaaatgtaaaaagaggggaatatgaatttcaaaactagtggagaagaaagacagaatttctcattaagaaaattggcagttggtcttgtatctgtggcagttgcgtgtttctttttgatgggaactggcctacagactgtatctgcccaagaatctcataccgttaattatacttatgttttagagtcggatttaactgacgaagagaagggtctcttggttacatccctaccacaagtagcggaagaaacagacgctacctactatctggtttatcgagcaaatcaagtattgcccaatacgggtactagctctccattggggactgttgccttggtggcaggtcttagtttgctggttgtagtagttcttaagggacctgatggcaagagaaagattagtcgattcttgttagtaacagctctaggcagtcagttgctgtctccaactgtccttgctttgacgagcgagacactagctgcttataacacccaattatcggtccaggcaggagatgccttgccagctccggttgatattcctggttatacttatctaggatatgtggaaaataagccagctctttctgtacagataactagcaaaccagcagaatctactgaaaatcaagagattaaattagaaaacagtcaatctcaggaagtagttactactcattcagcagattcgactatgggaactgaatttgtcaagcagtcaaatgacagcaagtctaacttagaaaatgtagatatctcagcagctacggctccatcttctaaaaatgaggatactagtcagcaaccagcagtttctctaagtcaggaaagcaaggatacgaatgttgtcaaaggcggggaggcagaccaaaaaacagcaccagctacagagtctgcaacaaattcaagtcaaactgatgggaatcaagaacagacaaatcaagtaccgccagcttcgcaaagcccagtggtagagaatcagcaaggaggaacatcttctcctgtagagcctaaaccacaagaaaataatgaaactgtagtgcaagcaaaagggacacaagagtcaggtcatgagggcgaagccttaatccaaccatcgcaaccagcgtacacagccccaattagcacccaaggtacccaagagtcaggtcatgaaggcgaatccctagtccaagcagagcagccgtcttatacagctccaattagcacccaaggtacccaagagtcaggtcatgaaggtgatgccctggttcaaccatcgcaaccgtcttatacagaacccgttagcgctcaaggtacccaagagtcgggccatgagggtgatgccctggttcaaccagcacaaccgtcttatacagaacccgttagcacccaaggtacacaagagcccggccatgaaggcgaatcccttgttcaatcagaactaccagtttacacaggtcctcaggagggagctccagttgagccaacagtgccagagtctacagaagttgttagcagtaagggcacgcaagagcccggccatgagggtgaagccttagttcaacccgttcagccatcttacacagccccaattagtacccaaggtacgcaagagcccggtcacgagggcgaggctgctgtagcagaggctcttcctgaactgcctttgacaagtaatcatcgtacagtaacagaaaccattcctcatgaaactgaagaaattgaagatgcgactatcttaaaaaatcaccgagaaattgctcaggaaggaaaagacggtttacgaacaatcgagtatgaagattatctcgtagatggtaaggtagaagctagcaaggaaatctcacgtacagaagtagaaccaaccaaagagattgtcaaggttggtagtcttgttaaaaccaaaccaatagttgaaattactaatctggttaaagatgagagcaaaaaagcagtagcagtcaactatcacttagatgacccaacgtctgcctttgtgaaggccaaggcccaaatttaccaaaatggaacactggtcaaagaggtgaacttgaaaaatccatcagatcaacaaacgattgatggattggactactatacgtcatacaatcttaagacttacctgacctataatctaggccaatctgatcaggaaagtacagaagtatcaacgaaagattttcagttagactataaaaaaattgaaatcaaagatgtggatgaagtggggctctatggtaaggaagatggtcactaccgtcgttatctgaacttatcagaagtaccaagtgatttgtcaccttattttgtcaaagtcaaatcagacaagatgaaggaaatgctgttaccagttagctctattaaggaaacagatgatgggaaatacaaggtaaccgttgccttcaatgaactggttcaagaggaaggttcaacatataaggataactatagtttcacaattgataagcaaaagcttgccaaggacggtgtctatacttcctttaagaaactgattgctgctatgcaaggcgatctcgctggaacctttaaacttggagctgatatgacagctgatgaagtttccttagctaagggacaaaccagctatgtgacaggcactttcactggtaaccttatcggtgcgagcgatgggcagccgtttgcaatctatgacctcaagacagccttgtttgataacttgaccaaggctactgtgaaagatattgaccttaaagcggtagcaattaagagtcaagaagacacagccagcctagcaaaagtggctactaacagccagattagtaatgtagctgtagaaggtcaattgacaggtagcaagtcagttgcaggtttggtagccaaggctcaggatacagaaataactaatagttcctttacaggtagcattcaggccaagcatgcggatgcctctccttactatgtgggaggtatagcagggctcttatctggtaataaggctaagattgataaggtagccgttgatgcaaatatttctagcaatgctcgcaacaataaccaatttgcgggaggtattgtagggaaagttcaaagtggtgctttggtgtctcatgcgctagcaagtgggactatcctcaatacgacaacctatccacgcgtcggaggtatagctggttctacatggcaaaatggccgtatccatcatgttgttagcacggtcaatactggagacggctatgccatcacaggagaccaatataagggagcggacatcaaagatgccagcactgccgagaacaagaaggccgatctctatgcgaccccaatcacccaagaccaggccagagaaaaggtccagtcttatgggatgacagtgacactaaacgatacaggtcaaacactaaaggccaatcagcacagtgtggactatactcagttaagccaaggtcaagctagtcgaaaagttgcttatcacaatatcgagaaattgatgcctttctataataaagagctagtggttcactatggaaatcaagttgatcctactgataagctttatactacagaactgttggatgtcgtaccaatgaaggacaatgacatcatcacagatattcaggccaataaagtagcaatcaataagcttatgttgcattttgctgacaatacaatcagttatctagatgtcacctacaaagaagacttcaaaaatacacaaattgcagagtacagcgtagcaggtaaaccctttatctttacgccagaggcctttctatctgactatacaaaagtgaccaatcaggtcctagcagatttgcaaggggttgaatatgactcagaagccatgagaaaagtccttggcattgaggcagatgcttcacttgatccactatatttggataaagaatttgaaaaagttaaggccaatatcggtgaacatctccgtaaagtgctagccatggacaagtctatcaatacgatgggagatagtgtagcaacctacatcagcgagaaaatcaagaacaacaaggaagctttcttgcttggtttgacctacctcaatcgctggtacaatatcaactatgatcacatcaataccaaggatctcaatacctataagtttgactttgatggtaatagcacagcttcaaccttggatactatcattgcactaggtcagagtggtatggaaaatctcaaggcatcaaataatccaagtgcctatgaaacaaccctggctgctgcaaaaggtcgcaagacagtgactgatttactagagtcttacagaaaactcttcctaccaaacaaaaccaataatgaatggttgaagacaaataccaaggcctatatcgtagagagtaaatcagcgattccagaagtgcgtgccaaacaagagtcagcaacaccagatagtaactatacgctgggagtctatgaccgtattacggcaccaagttggaaattaaaaaatatgctcctaccgctattgacattgccagaagaggatgtttatgtgatttcaaatctttctaccttggcctttggtggctacgaacgctaccgtgaccgtgtcaataatacagtcttgtcaggagaagaactgcgtcagtatgtccgtgctaaggtcgaccagtcggctaaatggcaacgagaccactacgatatctggtaccacctccttttaccagaatacaaagaaaaactcttccgttcagtcatggtttcagatggctttggtatgaaagatagcaatagcaagtattactggactaccctgtctgataaggccattgattctatctacaacttctttggaccaactggtaagtggtatggggaaagtaaaggagccggggcctatgccaacggttctgaggtccactatgtcagcgaccgcttattggataaatatggaacatctgtctatacccatgaaatggttcataattctgatggacatatttactttgaaggtaaaggtcgtcgtgaaggattgggagcagagttgtatgccctaggattgttacaatctgctgatagtctagataaggatgctattgtcttgaatactctctataaaggggataaggattcaccaactcgcttgcatacttatgacccggcaagccgcttcacatcagccgcagccttgcaagagtatgtgcacggtatgtacgatgtcttgtataccttggacgctatggaagccaatgccattttaactaagtctaacgatgtcaagaaaaaatggtttagaaaaatagagaatttctatattgaggacaagtatcataaacaaacgcatgcaggaaactctgttcgcccattgacagatgctgaaataagtaagctaactagtctggatgccttgattgacaatgacatcatcaaccgtcgggcttaccgtgataagagtgactatactcgtaatggctatcatcttatcagcatgttctcaccgatttatgctgccctcagcaatccaaagggtgcacctggtgacatcatgtttagaaaaacagcctatgaattgttggcagaaaaaggataccaagatggattcttaccatatgtatccaaccaatacgcagaagaagctaaacgaaacggggacattacctattcagattggcacggaaaagatgtgggagtcatcactgatagtttcgtcttgaaaaatgtctttgccaaccaatatggttcatgggctgatttcaagaaggatatgtttaataaacgtattcgcaagcaagaccagttgaaaccaatcaccattcagtatgaacttggtgtaccaaacagcagcaaggagattacaattcgttcagcagcccaaatgcaagaactcatcgatcaagcagtggcaaaagatgtggctaatattgaccgtacgacaagccatgctcctgcaagttgggtacacttgttaaaacaaaaaatctacaatgcctacctacgtagtacagatgatttcagagaatcgatttataaatcataaggaaactccctcacgctatcctgtctaatccagtccatcttgcagatggtcggtctttgtgatagaatagcataaagtccttttgagggggaacttgctaggaaatccccaagcattgtaacggatgaaccaccctcgcctttttgtgagggtggtttttcgtttgtaagtagaaaataagagagaaagagtctacatcatgtcgagaattgtcaccattcatccagtcaaggaaatccatcgctatggctttgagagtacccaggtctatcgagcccgtatcgcacgacatctaggcttagactacgtccacctcatgtcaagtccccagctacgatctgattggaagaaagacttgatcaagttaggatttttagaaaaggaattgctctgtgttccgcatagtttttcagatataggccatgtagacttatcagtgaagccagaaagtttaacgctagcagctggtgatcaggttgaactcaatgaggatggttttgtagcctcagttaccctaggagatggctcggggagatattactataccaaggggcccttcttgtttgaagattttaaggagaaggaacttcgttggtatcatgaaaatggagaactggccctggaaggacgctttatcaatccctttaaagaaccctctcctgtaaccatcttttatccagagtatatctaccgcataggaggagaaatccgttctgaagaggacttgctggttaagttcttagccagatgggcaaaacaaaccgacctcttcatccgcgaccaacaaatcgttcccaaacccagcctctggcgttatatggaaaacacggacaaaaattactatgaagttgtccatgaaaatatcatgcgagacttacgcctcgccaatatgcacaagacaaataaatatctagtcgccagtgaagtgttgactgataccttggcgaaacaagggtatgataccaagtttttaccaccaatgtttacagaaaaattaggtcagctaagaaaaattggacctgttttggactattgcttggtgggccatatgggagaaggcaagaacgttgaacttgtcattgaagcctttatcgaactctacaaacgtggctccaaggcccagattaccttttatggtggctcagaggaacgtctagcagaattacagaatcaatatgatcttccgccaaccattcactttaaaggtatcgttaacgaagtgccttatcatctgcaccaatgttacctgtcagctagttatacagagttatttgccaatgcctgtgttgaggccctcaatcaaggtttgctagccttactatcggatgtggatattgctcatcgtttctatgctggccagtccaatgccatcaacttgtttaaaaccaaatcagagttgattcaaaagatagaaaagatggaacagcctggtttttatctattaaatgaaaaaaatctagctttggcctctcgctattctctggaaaaagtagctcacatatacagagagctattagataggaacttctaggatgttgggaattctagtcaccctattgctctatttttgcttgatttccttgattgcctatcggaaaaaagggagcgaagaggactattatcaggttaagaaagctgttccagtgacagttttggccttctcagtctttgccaccttactcagtcccatttcctttctgactctggtggggaatgtctatacaggcaggtcctatctctggtttgcccaatgtggcatctttctagccattccactagctcatcgctattttctgcccctctatcaaaagggaaactatgagacagcctatcatcttttagaggacaagtttcaatcgactggcattcgttcactggcctcaggtcttttcatcctctaccagttggggcgaatagcagtggtgacctacttgttgtctcaggccttagagccttttatccccatcaatcagctggtcttgtcaggtttactccttctcttgacggtctattatctggcaaggggtggtctcttggttgtgctgtggacggacttctttcaaggcttggtcctactggctatattggccctctttctaccaagaattgcccaatcaggcctcgtcgtgaatggcagtcaacagctatctcactttgcggatacgctggatgggaagacggtcttgatcttagttgcaggagcaggttttagtagcttgttttcctacgtttcttcgcaggatatcgttcaacgttttaatagcaaaatggggcgtcgaaaaattggaaaaatcttatggcttcagggactcttgtcctttgggattgccagtttgctgtatctgattggctgcttaattcgtcaggaaaatttcgctaccacatcgaccaatcctgttctcattgcttacgctcgagaaggtctggccccttggtttggcagttttatcatgctggctctcttggcagcaggccaatccacagtttcatccagtatgaatgcaatcgtgacctgcttgaagttggattttgcttggtcaaagattcgctggtcgccaagtatcctatcctttgtcttagcaggcctgtcctggctcctctgtctcttgctcatgaatgcagaaatttactccatctacgaatggattaacggctttatgggcttgacactaggtgtgataggtggtttgtacctcttggtcttacttctcaaaagaccgaacttacagttagccaaaatctatctggtttttagtctaggagccttggttctctatcattacagtggcctttttgccaaccctaatccctggttaaatagcatcatcactaccctatctgccctgtttatctcatttctaggaagactatatgaaaacaacatctaaacccatagccgtcattttgatccgttcgggttcacgcggcttagtggataaaaatatcaaaccgcttgcaggcaaacccttggttttctataccatcgaagtcgctctagcttctaagctatttagtgaaatctggatctcatcagactcactagcctatctagaactctgtcgtcaagcctatccagagattcgttgtgtccatagaccaaaagaattggccctatccacaacctctagtttagaaaccttacgagactttttacagccctttgaagaagagcaggtctttgtgaatctacaggtgacctcacccttgagggaggtggagcatcttatcgattcctaccagctctactgtcagtctggcgccgaccatttgatttcctgtgttaaggcggacaagagtcgtagtcttttcttgcagttagcggagtcgtcatttatccgcccgcctcacgtttccaagcactatgctcggcaaaaagagcctgtctattactatcctaacggtagtatctggatttctcgcaaggaccgttacctacgagacgagaccttttacacagataagacagtagcctatgaaatgcccaaactctattcttatgatatcgacgatgccttggactttgaagtcgttgagaccttgctgcaccatcaccacctaggagaatcaaagagatgaaacacctcatcattgccacaacgcccttgcaggccaagattgcccagcatatcaagagcctctatcctgatcaggaatttgtcagcctttatgtcagtcctgtcaaaaatgcccgtcaggagcattatgccaaggattttgaccatgctcactatcctcagacggcagaggacttggctcagatttgtcaggagcttgccggcgactatgacactatcttttatgctagttttgacaatagcttgattctggacttggttgctagttcgacctaccaacacctcatgagttttgatgatggctatgcggatatttaccccttgggtatgtatgccctccctcttcaacccagtcaggtggggcctttgggcttgactagagatgatttgattgagcggacggaaaagcactataccctctatcgcagtgactaccatgtcgtggctagagaaaagctagtttatctggagcatttttttgacctgcctcaagctcccgtttcaaatggtaagacggtcaaggtcctgctgggacaaaagttctctgaagaggacgaccagatctccatccgctttatcagcacttatgccaaggccttggcaattgacctctatctaccccatcccaaggaaaccttcactatccctgatgtgacctacttggagacggagttgatctttgaagatgttctagcccaactctttcaagaatacgagttcgttcatgtctatcattttacctcatccgtcagcctgcaccttaaagacctgccccatgtgaccatcacaggtatttctctcccctactatgaggaccgtcaaaaagaattgcgacgattaggttgtcagtttgaaatagtttcacttggctggtagtataaatgtatatttttaaatatgtaaatccatacatctgtatggattttttatatataaatatagcgaaaaactatagtttgaatgatcaaaaagtattgagattatttgtatagggggttttaaagtgttaaaatagaagtgtcgggttttcaggtttatcaattgttatggctataataatataataatctttgaaaatcatacaaaaaaataaagataaaggatgctaaggatgtttataaataaaaaggaaaaattttccatccgtaagtttaaagacggtcgttcagactcagtcaaaatcggtacagttgctctgattgttggtgcagcccttgcaatggctgctggaacgcagacagttgaagcggcaatgacagagaacagtgacaacacaacaacgatttctaatgataagggatcagtaactgtagatactggaaatattaaggatccgaataatggtaaggacttttcaactgatgcaactgataatgggacaaaagaaattacaaaaactggaaaagtagattacaaatacgtaactgctgaaggaaatactgtattagaagaaaacaaaaaccaaaactctggtgctgataaaactatcgaaacaacatatgatgtatacggtaaatcaggagaagttttcaaaggaactacaggtggggatgcagaagatagcgacctaaacgacgctaaagaaaatggtaagaaagaaacaattgaaaaagatggaaaaacttaccacctaatcggagagcctaaagtcgaaactactggagatggtggaggagtatactctgatacaactctaggtgatataactgcgaaattgactccagaaggattaagtaatgcagaaggtaaaattacctatgataatgtaaaagctggtggaaaagcttggattgttgaacaaacaggaaaaggaacatatggtaaatatgtacaagctgattcaggtgctatcacatctgatgctaagatggtagaagctttcaaagctggagaagcggcggcgaaaaacttcacttcagctaacgtaactgctgacggtggaatcaaagaaggagactacgttttcgttcttgagaaaaacacttatgtaactgttagtaacgatagtcctcaattaactgctatgatacctttatcgcctaaggacaatgtagctgatgacgccgatgacccttatggagaggggactggtgcaagtctagatagaacatatgcaatggttcaaaaatttaaagcggcgccagatactttaacaggtgaaaacaacaaaactgttgtaaaagggtatcttgcttatcttcaagaaaaaggattagaagataacatgcttaactttaaacgatattttgttgtggggctagaagcaaaaactggtgtagaatccgcaatagcagttgataatggagatcaagttgatgctaaaggaagaccgacatcagatgtaactgtggattattcaggggtttctgagtcaggaacaactgctatagatggtggaaagggtgattttactcttaatcttagttctcctgatgcggaagttgaaacatacacttaccgtgatgaaatcactccacttcgtgcatatcgtttagcaagtggtactacaacaatcacttatacttatgcagaagaaaaaactcgtgaagtcgagaaaaaaggttctgtagtcgttaactaccaaacagaagacggaacagaattaaaagctccttacactgatactcctgaaacagtagctgaagtagtaactgagcattactatgttgatgctgatggacaagaagtagttgtagaagacaaaactgttagaacgcctaaaaacgtagcctacaacactaagaaaaatgaaactgaaaaacctcaaaaacttacagatgcacaaggaaatgtttactacctaaacgaagcaaatacaacaacatctgtaaatggtacagaaactacatcgccagctgaagaaggtacagtagtagaaggtgttacaaaagtaacttacgtttacgaaaaagctggatcagtcatcgttaattaccaaacagaagacggtactccattagtaggaactgcagacggtaaagatgtagcttcaggtgcaaaagacactgacaatggaaaaccaggttctgaatacaatactgcagataacggattgaaaccaaaccgcatcacaactgcagaaggaaaagtatacgaactagtaccaacagcaactaaaggtgacgaaacaggtactgtagaatcaggtcaaactaaagaagtaacctacgtttataaagaagttaaaggtaatgtagttgttaagtatgaagatactgaaggtaacacacttgctgaagacgaaaaagatgaaacagatgcttctctaaatgttaaatacgatacagcagaccacaaaaaagctgaaatcactaaagatggtgttaaatattacttaacagctaaagaattgaaagatgattctaaaccagctactggagatgttgttgaaggtacaactacagtaacttatgtttatgaaaaagctggacaagtagtcgttaattaccaaacagaagatggaactccattagtaggtgttgacgcggatggtgcaaacgttgcttcaggtgctaaagacactgtagatggaaaaccaggatctgattacacaactgcagacaacggaatgaaaccaactcgtatcacaactgcagaaggaaaagtatacgagctagttccaacagcaactaaaggtgacgaaactggtaaagttgttgctggagaaactaaagaagtaacatacgtttataaagaagtaactggtgatgtagtcgttcactacgttgatacagaaggcaacgtaatcgctgatgataaagaagatacaaaaggtgcttctctaaacgctaaatacgatacaactgacaacaaaccagagaaaatcgaaaaagacggaactgtttactacttaacagaaaaagctgtcaaagacgattctaaaccagaaaacggagacgtagtagaaggtaagactgaagtaacttacgtttacgaaaaagcaggacaagtagttgttcactacactgatgaaaaaggtaacactattcaagtggatgctgttgataccaaagacggcaaaccaaacgctgactacaacactgctgataacgacatgaaaccaaaccgtatcactactccagaaggaaaagtatacgaattaatccctcaatcaactaaaggtgatgaaacaggtaaagttaaagctggagaaactacagaagtaacttacgtctacaaagaaatcactggtaatgtagtcgttcactatgttgatacagaaggaaacacattagctgaagatacgaaagatgtagaaaatggatcactaagtgataaatatgacacaactgataacaaaccagctaaacttgaaaaagatggtactgtttactacttaacagctaaagaattgaaagacggttctaagccagaaaacggtgcggttgtagaaggaactacagaaatcacttatgtatacgaaaaagcaggaaacgttcttgttcattacgtagacgaagctggaaacactcttcaagcagatgctgttgatactaaagacggtcaaccaggagctaaatacgatacttctgataaggacatgaaaccaactcgtatcacaactccagaaggtaaagtatacgaattagtcccagcatcaactaaaggtaacgaaactggtgatgttgaagcaggtaagacgacagaagtgacttatgtttacaaagaggttaaaggaaacgtagtcgttcactacactgatgaagcgggtaacacaatcgctgaagacgttaaagatacgactgacggatcagtaagctcagcttatgacacaagtgacaacaaaccagcaactatcactactaaagatggtaaagtctacgtacttgtaccaacttcaactaagggtgaagaatctggtaaagtaaccgaaggaactacagaagtaacttacgtttataaagatgccaaagaagaagcttctaaagcaatcgataaagctttgtctgaaaaagaaagtaagatcaaagaaaatcctgagttaacaaacgaagagaaagaaaaagcgattgaagaagctaagaaaacagctgaacaagctaagaaggcattggaagaagcgaaaactcctgaagatgtagaaaaatctactacaaaaggtaaagaagaagtagagaaaactcctgttactccagaagacaaaccaaaagcgaaagaagcgattgataaagctctagaagaaaaagtgaagaagattgatgaaaatccaaacttgactccagagcaaaaagaaaaagctaaagaagaagctaagaaagatgctgaagaagctaagaaagccatcgacaaagcaccttctaaagaagaagtagaaaaagctaaagagaatggtaagaaagaagttgagaaagatactccaactccagacaaaccatcaactccgtcagaaaatgataaggatcagccaactacaccttctccagaagataaagcaaaagcgaaagaatcgattgataaagctctagaagataaagtgaagaagattgatgaaaatccaaacttgactccagagcaaaaagaaaaagccaaggaagaagctaagaaagaagcagaagctgttaagaaatcaatcgaagaaggtaagacaactgaatgggtagacgaaaaaggaaacccaatcaaacctgtaacaccaggaacatacccagcaggatctactcctaactatgaactagtaggaacagttacaaacaaagaaacaggtaaagtaactcatatcttcaaaccatcaactaagaaacctgtaacggtatgggtagatgtaaatggtaagccagtgaaaccgctagctgaaggtgataacccagctggatcaattccaggatatgctttagtagaaaccataaatgttgaaggaactggtaatgtcatccacgtatttaaacgtactacaaatggaagacctcaaaaagaagattctacacatggaggatcactcactccatctcaaccaggttctccagcaagaccttcaacaaatccggtgagaccgacagacccaagtcaaccagaaactccagtagttcctgcagacccaagtcagccagctaacccagctaatccggctaacccagcgggtccagcaactccagcgatgccatcggcaccagtaaatggtgaagcaccacaagctccagcagctccatcagaagctaaaggacaagctgaacttccaaacactggtacagcagataatgctagcctagcagcacttggacttcttggagtcttgagtggatttggacttgttgctcgtaagaaaaaagaagactaattctaattagattttctgacaagaataaggagtaggatatcatatccgctccttttctttttgggttgagataagagtcatcatagcattggttaaaaattttcggtggttttattgtcaattctctgtaaatttttctcgttctaatcccatatagacaagatggcagaatcataatctataagttgtctggcttgactttcttgatgggaattatataatagatgtaataaaaataattacaaccgagaaagaggaccatttatgacctatgaatacaagagtcacatttatttagcagaggcagttttaaatgtaaaggatttggcaagtcaaacagccttttatcagcaagtgcttggtttagaaatcttatctcaaactgagacagaggtcgttctgggacttggaggaaaagccttggtacacttgattcaaacacaagagagcggtgaagtaagggaacattatggcctttaccatctggccattctcttgccgacacgaaaggctttggcggatgtcttgaagcacctgacagatttacagattcctctagttggcggtgcagaccatgggtacagtgaggctctttacttggaggatttggagggaaatggcattgaactctatcgagataagccggtttccacatgggatattcgagaagacggacgcattatcggagtgacggaggctcttgcggcgcaggacatttatgagctgggggaaagagtagagccctttatcctggcagaaggtacgagaatggggcatattcatctttccgtcaaggatagtcgaaagtccagccagttttatcaaaaggtgttagggttagaggataaattcagtgtgcctagcgctagttggattgcagctggggactatcatcatcatttggcagtcaacgaatggggaggaaaaaatctggctccgcgtaagcaagacttgccaggtttggcccattatgttattgaggttgctagtaaagaagaactgttaacgattgcccagcgagcacaagaagttgatgcaccaatcaaatggctgacatcaagccagttggaaatcacagacccagacggaattgtgactcgtatccgcttagacaggatatgatgacaatcagagtataaattgtggaaagtgctccttatcctagtcagatatgtaaaaaatttgatatgatagtagggaacaaggagaagaaaacaatgaccagtgaataccagaaaatgatagcaggagaggtttaccgtccatcggatccagaattgcgagccttggctcaggcttctcgccaaaaacagtctgcctttaacaaggaagaagatcctttgaagggagtcgaaatcatcaagatctggttcggctcgactggacaaaatatctttgtcaatccacgcctggtggtcgattatggggtcaatattcatctaggggaaaatttttattctaattggaacttgaccatgctggatgtttgtccgattcgcatcggggacaatgcgatgattggtcccaactgtcagttcttgactcccctccatccattggacccgcaggaacgtaattcaggtgtggaatacggcaagcctattactatcggagacaatttctgggctggaggtggtgtcattgtccttcctggagtgacattgggtaataatgttgttgctggagcaggggctgtaatcactaagtcctttggcgacaacgttgtcctagctggtaatcctgcgcgtgtgattaaggagatatctgtgaaatagaagtaaaaaggaacagcggaggttgtttcttttttgtaggtttcatcatcttttactcagactacatttacctactctatctcttagaaagtttgcttcattgattaatttaaaagcatctcgtaactgggatgcttttttctcctcaatttatcagcctcctccttgacactcagtcagcttttgatacaatagtacaaaattagaggaggtgggtcatgattcagaaacatgcgattcctattttagagtttgatgataatcctcgtgcggttatcatgcccaatcacgaggggctagacttgcacttgccaaagaagtgtgtctatgcttttttagaagaggagattgaccgttatgcgagggaagtaggggcggactgtgtcggcgaattcctttctgccaccaagacctatccagtctacgtcatgagctacaagggcaaggaggtctgtctggctcaggctcctgttggttcagctccagcagtccagtttatggattggttgattggatatggtgtggagcagattatttccactggaacctgtggtgtactggctgatatagaagaaaatgcctttctagtccctgttcgggctttacgagacgaaggtgctagctatcactatgtggcaccttctcgctatatggaaattcagccagaggctactgctgctattgagcgagtgttggaagccaaagggattccctatgaagaagtcatgacctggacgacagacggtttttaccgagaaacggctgaaaaggtggcttatcgcaaggaagaaggctgtgctgttgtggagatggagtgttctgcgcttgcagcagtagcccaactgcgtggggttctctggggagagttgttgtttacagctgattccttagcagacttggaccagtacgatagtcgtgactggggttcagaagctttcgagaaggccttggaactctgccttgagatagcctttcagatatagctactctcctactttttatggtacaatggatgtatgttattcaaattatttgtgaaaaaaattgagagagccttgggcggactttcgccagctcgtcgcatctttttaagtttcgctggagttatttttataggctctctccttttgagtttgccttttgtccaagcgagtggttcgcaggccacttattttgaccatctttttacgacggtgtctatggtctgtgtaaccggcctttctacgcaaccggtagctactacctataatgtctgggggcagttgatttgtatgctcttgatacagattggtggtctggggctcatgacttttatcggggtcttttatattcaggggaagcaaaagctcagtcttcgcagtcgtgaaactattcaggaaagctttagttacggggagactcggtcgctgaaggcctttatgcgatctatctttttgacgacttttctagtggagggcttgggtgcctttctactaagtttccgttttattcctgagttcggctggggacgaggcatttttacctctatctttttagccatttcagccttttgtaatgctggttttgataatttcggcagtagcagtttagtggcttttcagacggatcccttgatcaatctggtcattgctggcttgattatcacgggtggtcttggctttatggtctggtttgacttggcaacccagtttgacaagaagaaaaaacgccgtctgcgtttccacactaagctggttctcttcttgactgcagggatcttgctgtttgggacagtatccacactctttacggagtggcacaatccaggaacaattggcaatctcagtgttccagagaaagtgctggttagctttttccaaaccgtcagcatgagaacagctggctttgcttctattgattacactcaagctcggcctgtgaccttgtttatctatatcctacagatgtttctgggtggagcgcctggagggacggctgggggactcaagattacgactttctttgtcttgttggtctttgcgcgtagtgaattgctgggcttacctcatgctaatgttgcgcagagaaccattgaggtccgaacagtccaaaaatcctttagtgtcttcattatctttttgatgaccttcttgttgggcttgatgttgttgggaattacagcagaaggaacaccgcgatttatttacctcatgtttgagaccatttcagctcttgcgacagttggggtaacggcaaatctgacaccagaattaggcaagttagctcttagcattatcatggtgctcatgtttattggccgtatcggtcccttgaccttgctggttagtctagctgactaccagcctgataagaaagatttgattcagtatatgaaagcagatattagtattggataagaaaggaagaatgatgtcagatcgtacgattggaattttaggtttggggattttcgggagtagtgtcctgacagccctagccaagcaagatatgaatatcattgccattgacgaccacgccgagcgcatcaatcaatttgagccagttttggcgcgtggagttgtgggcgatattacagatgaggaactcctcagaactgcaggaattgatacctgtgatacggttgtagtggcaacaggggaaaatctagaatcgagtgtgcttgcagttatgcattgtaagagtctaggggtaccaagggttattgccaaggtcaaaagccagacagctaagaaggtgctagaaaaaatcggtgctgactcggtgatttcacctgagtatgaaatggggcagtccctagcgcagaccattctctttcataacaatgtcgatgtttttcagctggataaaaatgtgtctatcgtggagatgaagattccgagtgtttgggcaggtcaaagtctgagccagctggatctacgtggcaaatacaacctcaatgtcctaggattccgtgaacaagaaaattcaccactggacgtccagtttggtcctaatgatctcttgaggtcagatgcctatatcatggcggtcattaacaaccagtatctagatgatttggcagaattaaattcgtaaggagggggatcccctcttttttgatgtccaaaatagcaaatagagatagcaacccttgtattctagtaaaagtccttcaaaagctggactttatggtagaatagaaagaagtgacaagagagaaagaaaaaatcagtcccctaaaggagtagattatgaagttattgtctatcgccatccctagctataatgccgctgcctatcttcattactgtgtggagtcgctagtgattggtggtgagcaagttgagattttgattatcaatgatgggtctcaggaccagactcaggaaatcgctgagcgtttggccagcaagtatcctaacatcgttagagccatctatcaggaaaataaaggccatgggggtgccgtcaatcgtggcttggcggaggcttctgggcgctattttaaagtagttgatagtgatgactgggtggatcctcgtgcctatttaaaaattcttgaaaccttgcaggaactagagagtgaggggcaggaagttgatgcctttgtgactaattttgtatatgaaaaggaaggtcagtctcgtaagaagagtatgagttacgagtcagtcttgcctgtccaacagatttttggctgggaccaggtcggaaatttctcaaaaggccagtatatcatgatgcactcgctgatttaccggacagatttgttgcgagcgagccagttccaactgcctgagcataccttttatgtcgataatctctttgtctttaccccccttcagcaggtcaagaccatgtactatctgcctgtcgatttctatcgttatttgattgggcgtgaggaccagtctgtcaatgagcaagtgatgattaagcgcattgaccagcaactcaaggtcaatcgactcttggtagatcagcttgatttgtcccaagtgagtcatccaaaaatgcgagaatatttgctgaatcatattgaaatcacgacggtgatttccagtgccttgctcaatcgagcaggcacagcagagcatcttgccaaaaaacgggagctatggacctatattcagcaggaaaatccagaggtctttcaggctattcggaagaccatgctcagccgtttgaccaaacattcagtcttgccagctcgcaaactttctaatgtcgtctatcaaatcaccaaatctgtttatggatttaattaatataagtattttataagagggatttaataaaaattttaactttttcttaatcctttttaattttaggagattatactagagtcatcaaataaagaaaaactctaaggagaatcctatgaaattcaatccaaatcaaagatatacacgttggtctattcgccgtcttagtgtcggtgttgcctcagttgttgtagccagtggcttttttgtcctagttggtcagccaagttcggtgcgtgccgatgtagtcaatccaacccctgctcaagttatgccagatgctacttcggtgagtgaaaagagtgacttaccagtagaacttctcaaagaagcagtcgatacagctcttccttcagaacaggtagactcaacacctaaagcaagcttggaagctacaaactctccagaaaaaagcagatgcaggtgctaaagaccaagtagttgcaccaaaagaagaagtacaagcaaaaccagaatctaagaaacaaacagaagatgcggttaaacctgcgacaaatcctgcgcctacagttgctggacaagaccgtgaagcaagtgaagtgcaaccagcaactactccagctgaagtccaaaaaggcgtagctgataatactaaagacacagtggatgttccagcctcttacttggacaaagccaatttcccaggcccattcacagctggtgttaaccaagtcattccatatgaattcttcgctggtgacggtatgttaactcgtcttatcctgaaggattcagacaaggctccatggtcagacaacggttcagctaaaaaccccgctctcccaccagtagaaaacttgggcaaaggcctttacttctacgaagtagacttggcaggtacccaaggtaaatctgataaagagcttctagacctcttgaaacaaaacggcactcaaagctataaagcaactatcaaagtgtacggtgcgaaagacggcaaggcggatttgagcaacctcgtagcgactaaggatttggatgtcaacttgaacggcttaactactccagctgaagtgcaaaaaggcgtggccgacaatactaaagatacggtggatgtcccagctacttacttggacaaagccaacttccctggtccattcacagccggtgttaaccaagttatcccatacgaactattcgctggtgacggtatgttgactcgtttgatcttgaaagcttctgacaaggcaccatggtcagacaacggatcagctaaaaatccagctctcccaccagtagaaaaattgggcaaaggcctttacttctacgaagtggatttggcagggactcaaggaaaatctgataaagagcttcttgaccttttgaaacagaatggcactcaaagttacaaggcaactatcaaagtgtacggtgcaaaagatggtaaggccgatttgagcaatctcgtagcgattaagaatctggatgtcaacttgaacggcttaaccactccagctgaagttcaaaaaggtgtggctgataacaccaaagacacagtagatgttccagctacttacttggacaaagctaacttcccaggcccattcacagccggtgttaaccaagttatcccatatgaattcttcgctggtgatggtatgttgactcgtcttatcttgaaggattcagacaaggccccatggtcagataacggttcagccaaaaatcccgcccttccaccagtagaaaacttaggcaaaggtctttacttctatgaagtagacttggcaggaacccaaggcaaatcagataaagatttgcttgacctcttgaaacaaaatggtactcaaagttataaagctactatcaaagtgtacggtgcgaaagacggcaaggctgatttgagcaatctcgtagcgacaaaagatttggatgtcaatttgaatggcttaaccactccagctgaagttcaaaaaggtgtggctgacaacaccaaagacacagtggatgtcccagctacttacttggacaaagccaacttcccaggcccatttacagctggtgtcaaccaagtcattccatatgaattcttcgctggtgacggtatgttgactcgtcttatcttgaaagcttctgacaaggccccatggtcagacaacggctcagctaaaaatccagctcttccaccagtagaaaaattgggcaaaggcctttacttctacgaagtagatttggctggtacccaaggtaaatctgataaagagcttctagacctcttgaaacaaaatggcactcaaagttacaaggcaactatcaaggtgtacggtgctaaagatggcaaggccgatttgactaaccttgtagcgacaaaagatttggatgtcaacttgaatggcttgaccaccccagctgaagtccaaaaaggcgtggccgacaacactaaagacacagtggatgttccagccacttatttggataaagccaacttcccaggcccattcacagccggcgtcaaccaagtcattccatacgaattcttcgctggtgacggtatgttgactcgtctgattttgaaagcttctgacaaggccccatggtcagacaatggttcagctaaaaatccagctcttccaccagtagaaaaattgggcaaaggtctctatttctatgaagtagacttggccggcactcaaggaaaatctgataaagctcttcttgacctcttgaaacaaaacggcactcaaagctataaagctaccatcaaagtgtacggtgctaaagacggcaaggcagacttgagcaaccttgtagcgacaaaagatttgacagtgaacttgcatggacatcagtctctgattccgatgcagtcaggtttcgtcccatcttctaatggttcagctatgccggctccaatgatgaatagtcatcaagatgcatctaagatgaacgctcaaatgcctagtgccaatcaagatgagatgaaatctaaaatgccagctgctagtcaggataagatgatgcctaacaaagagcaggacaaaaccatgaatgctagccagcctatggcaacaccaagcatgaaacaagatcaagctccagcagcctcaagcaaaatgtctgatgaaggcaagatggtatctaataacaaggtatcaagtccaatgatggctgatcaaatgaaagaccaaaaagacatgcttccatatactggtgaagcccaaacatcaatggctactcttggattctttggattagccttggccggacttctaggtggactcggtttgaaagctaaaaaagaagaaaatgactagtctagctacagactttctatctaggatatgaaaaatccagatatcgtttagaatgttcgtaaagagattaaaatagtgttatactattgtggtatagcactgtttttttcaaaggagagacagatgggaaagacaattttactcgttgacgacgaggtagaaatcacagatattcatcaacgttatctggttcaggcaggatatcaggttttggtggcccatgatggagtagaggccttagaaatcttcaagagaaaaccaattgatttgattattacagatatcatgatgcctcggatggatggttatgatttgattagcgaagttcagtatcaatctccggatcagccttttctctttatcacggctaagaccagtgagcaggacaagatttacggcttgagcttaggggcagatgactttattgccaagccctttagtcctcgtgagctggttttgcgtgtccacaatatcttgcgtcgccttcatcgtggaggtgagacagaagtcgtcagtctcgggaatttacggatgaatcatggtagccatgaggtccaagttggagatgtggcgcttgatttgaccgtcaaatccttcgaacttctatggcttttagccagcaatccagagcgggttttctctaagacagacctctatgaaaaggtctggcaagaagactatgtggatgacaccaataccttgaatgttcatattcatgctcttcgacaggagttggctaaacatgctagttcagaaacacccaccatcaaaaccgtctggggcttgggctacaaaattgagaaagcacgaggtagttaatgaaattaaaaagttatattttagtggggtatgtcatttcaacactcctaacgattatcgtggttttttgggccatccagcgaatgctaattgaagaaagagaaatttatttcctagtgggtatgactctagtggctagttttatcggtgctgggattagtctctttctcctatcgccggtctttacttcattgggcaaactcaaggaacatgccaagagagtagcggacaaggatttccctgcaaatctggaggttcaaggccctgtagaatttcaacaattaggccaagctttcaatgaaatgtcccatgatttgcaggcgacatttgattccttggaagaaagcgaacgagaaaagggcttgatgattgctcaactttcgcatgatatcaagacccccatcacttcgatccaagcgacggtagaagggattttggatggggttatcaaggaaggagaacaggaccattatctagcaaccattgggcgccagactgaaagactcaataaactggttgaggagttgaattttttgaccctaaacacagctagaaatcaggtcgaaacgaccagcaaagacagcatttttctggaccagctcttgattgagtgcatgagtgaatttcagttcttgattgagcaggaagagcgagatgtccatttgcaggtaattcctgagtctgcacggattgagggagattatgccaaactttctcgtatcttggtgaatctggtcaataatgcttttaaatactcagctccaggaaccaagctggaagtggtggccaagctggaaaataaccagctttcaatcagtgtgacggatgagggacaggggattgccccagaggatttggagaatattttcaaacgcctttatcgtgtagaaacttcgcgtaacatgaaaacaggtggtcatggcttaggacttgctattgcgcgtgaattggctcatcaattgggtggagaaatcacagttaccagccagtacggcctcggaagcacctttaccctccttctcaatctctctggcaatgaaaataaagcttaaaacccctttacaaatctagccattcatggtaaaatggattttgtgtgaaatatcagcaggaaagcatgaagctcgtcaacaggtgtcttatgataagtaaccttggctgtttaggcgaagggcatctgcacgaatcagggctttctaagtgactatttccaccgaaatattatttatatcaggagggcattcacatgtcacgttatacaggaccatcttggaaacaagctcgtcgccttggcctttcacttacaggtacaggtaaagaattggcacgtcgtaactacgtaccaggacaacacggaccaaacaaccgttctaaattgtcagaatacggtttgcaattggctgaaaaacaaaaacttcgtttcacttacggtgtaggtgaaaaacaattccgtaacttgttcgtacaagctacaaaaatcaaaggcggaatcctaggtttcaacttcatgcttcttttggaacgccgtttggataacgttgtttaccgtcttggtcttgcgactactcgtcgtcaagctcgtcaattcgtaaaccacggtcacatccttgttgacggaaaacgcgttgatatcccatcataccgcgtaactccaggtcaagtgatttcagttcgtgagaaatcattgaaagttccagctatccttgaagcagtagaagctactcttggacgtccagcattcgtatcattcgacgctgaaaaattggaaggttcattgactcgcttgccagaacgcgacgaaatcaacccagaaatcaacgaagcacttgtcgttgaattctacaacaaaatgctttaattttaagatatatcttacagaaagcctacaacagtgggctttttgctttgtcttaaaatgttgatctctgggtttgtttagagatttgctagtaaggttattggtgtatctaggtctatctattccaagaatgacgcgatattgatgatataatattttagcctcctcagtttaatgaagggaggtgttatgtatgctagagttactttccctttttctagctccgttacttgttaacgtactatctgagcttttcaagctatggataaagagacgtagcacccttttagagggtagcaaaaaaccccatcggtggcacggtggggttttttagttatatatgctagaagcattattttccctttatgctttcattctaacacaacccctccgatatttcaagcttttgttttgatatgtcctcagaggtcattacgcaatcttataacactgaagcctgtggtttgagtccgctttactgaaattagcccacgcgcttctagcctccattctacagcaaagaaatcaactcttttctaggggatttccgccctcatttttgtcttttgtgctaaaatagacttataaattgaaaataaggaatgtttatgaaatcgggtaatggtttttggaaaggctgtctctatttttggggcttcttgttcttattaggcctgttggtccaatatgctcttccgcttgcggcttgtgtcctgctaggctatggtggttatcgcctctataaacgttggcgctatcctcttttgcaggatcgttcgctcgatgatcggattgagcttttaaaagctcggattcgtcaggcggacaaggatattcagcagttagagggagtcttggtagagaaaggctcagattcctataagagtttggctaatcaagtattgatcgaactgagggaaatccatcaggaggcggattgtctcaagtcctatatcgatgctgatgtctacaaccgtattgacaaaaaggttcgtacagtaagggcaaacatcgatgttcagctagaacgtttggatagagaaagtcaggtagatcttgaaaatgcggagccagaggaactagctccagaattgtcccagaccttggctaatattgccattgaccatcaggcaattttagataagattgccacctctgctgagggggataaggaagaattgactgccattcatagtttgaagatggagaaattccaaacgattttagaaggctatttaaagattaaggccaatcctaaaaactataatcgagccgaagaacgtttgcaacaagctaaagcagctatcgaacaatttgaccttgagctggaccaagtcctgagagaactcaatgaaacagatatgcgtgattttgatatcagtctgcgtatcctagaaaaagatcgtaaagaataggttagaaacaaaggagtaaccatgacagaatttaattttgatattgaccagattgccaataatacggtagctaaggtggataaaacaacccaaatcatcgagacaaatactggctcagacaagaccttgaccttccttgaaaagttgagccctgagcagcaagaaggaatcaaggcgcacgtgccccagttagtagaccagtttgtcaccaatcaaaatgctcttttggattttggacaatctgctgtcgaaggtgtgaataatacggtcaatcgtatcttgtcagaacaaaagaaactgcagattccccaagtggatgatctactcaagaacaccaaccgtgagttgcaaggctttgtagtcaaatacaagaacgctgaaattgctgagttagaagagaagccaaactttttgcaacgattgtttaacaagagcaagaataccttacaggaattttactttgactcaaaaacagtggagcaaaagctcgatggtatggctgccgcagtggtcaagcaagaagatgtgctagctcgaaatatcgtctctgctgagatgttgattgaggacaataccaaatccattgaaaatctagtgggagtgatttcctttatcgaagccagccagacagaagctggcaatcgtgctgccgaactaaaggcccaagctgaccaacttgatacaagtacggtagaataccagaccaagtctcaagaattggcccgtatggcagaagtggtcaatacactcgaacaacaacatacagagtatgtcagccgtctctatgtggcctgggcaacaacacctcagatgcgtaatcttgtgaaggtgtcatctgatatgcgccaaaaattgggcatgcttcgtcgtaatacgattccaacaatgaagctttctattgcccaacttggtattttgcaacaatcaatgaaatcaggtgtcgtggcagatgccattgtcaatgccaataatgctgcccttcagatgctagctgaaaccagcaaggaagtgattccgcagatggagagaattgcacaaagcccgacagtcgctgtcgaatctgttaccaaactggctgaaagtctggtcgctcaaaaccaaggtatcgtcgcagcaattgagttgggacgtcagaaacgtgcccaactagaaacaaccatcgtcaagtccgcagaaatgatcaacgattctgtcaaactacgcgatgagaaaatcgttcaagcccttctagaccaaggcaa

SEQ ID NO: 56 - DNA, 24459 bp, Streptococcus mitis NCTC 12261 contig2
attaagacaatacgaggagaaagatgaaagaaaaaggattttgggagggggcgcaggcagccatgccaacggcccttggttatatcagtatcgggctggcctgtgggattattggtgcgccttatgtgacacctgtggagatgggcttgatgagcctctttgtttatgctgggagcgcccagtttgccatgttggccttgattgcggttcaagctcctgtggcagctattgctatgacggtctttttgatcaatttgcgtctctttttgttgagcttgcacgcatcaacctatttccgtcataccagtctctggcaaaatatcggtatgtctagcctcttgacagatgagacttatggtgttttgatgggcgagttagcccatacagacaaggtcaatcctatgtggatgcacggaaacaatctcaacagctatgtggcttggtttgtgggaacagttgtcggaacggctctgggtggcctgctaccaaatccagaaatctttggattagattttgccttggttgggatgttcatcggaatttttgcttcgcaattccagattatgcaaagacggattcctgtccgcaatctgctcattatcctagcagttgttgcggtgtccttctttttactcttaacagtggtgtctcagtcactagctgttctgtttgcgacgctacttggttgtacaatgggggtggtattagatggtcagtaagtatcttttattagcagttattttctctggcttggtgacctggattccccgtatgattcccttcatcttggtcaagtataagggtttgcctgcaatcgttgagcgttttttgaagttcttgcccgtttctattatctttgccttgattctttcaagcgtagtaacaggtaaggttgggagccttcctcaaatcaaatggctggatttcttagcagtctttccaacagcttgggtagcctttcgttatcgcaatctagtcggaacagttctctttggagtggtcttaattgcactcttgcgtttggtcttttaaatcagccataaagaaaacctatcacagagatagatatcatataatggcgtaaatgttttttttctgttaagattataaggtattctattttggaggaaatgaaatgaaaaaaatcgttaaatactcatctcttgctgccctagggcttgttgctgcaggtgtgttagcagcttgctcaggtggtgctaagaaagaaggagaagcagctagcaagaaagaaattatcgttgtaaccaatgctacaccaaaaccattcaactatgaagaaaatggcgaattgactggttacgagattgaagtggttcgcgctatctttaaagactctgacaagtatgatgtcaagtttgagaagacagagtggtcaggtgtctttgcaggacttgatgctgatcgttaccaaatggctgttagcaacatcagctacactaaagaacgtgctgaaaaatacctttatgcagctccaactgctaaaaaccctaacgttcttgtagtgaaaaaagatgactctagcatcaaatcgtttgatgatatcggtggaaaatcaacagaagttgttcaagggacaacatctgctaaacagctagaagactacaacaaacaacactcagataacccaactgtccttaactacgttaaaggggacttccaacaaatcatggtacgtttgagtgatggtcgatttgactacaagatttttgataagatcggtgttgaaacagtgatcaaggatcaaggtttggacaacttgaaagttatcgaacttccaagcgaccagcaaccttacgtttacccacttcttgctaaaggtcaagatgagttgaaaacgtttgtggacaaacgcatccaagaactctacaaagatggaactcttgaaaaattgtctaaacaattcttcggaggcacttatctaccagcagaagctgatattaaataatttcttgaaatcatccattctgagtagatgggtgatttctcagtttttagggatatagttttaaactatatatctgactatctaataacaatttgtgaaatcaaacaaattgtgagatactagtacggtattatttttaaaggagatagaatcatgaaaatcaaaaaatggcttggtgtagcagcccttgctacagtcgcaggtttggctcttgcagcttgcggaaactcagaaaagaaagcagacaatgcaacaactatcaaaattgcaactgttaaccgtagcggttctgaagaaaaacgttgggacaaaatccaagaattggttaaaaaagacggcattactttggaatttacagagttcacagactactcacaaccaaacaaggcaactgctgatggcgaagtagatttgaacgctttccaacactacaacttcttgaacaactggaacaaagaaaacgggaaagaccttgtagcgattgcagatacttacatctctccaatccgcctttactcaggtttgaatggaagtgacaacaagtacactaaagtagaagacatcccagcaaacggagaaatcgctgtaccgaacgatgctacaaacgaaagccgtgcgctttacttgcttcaatcggctggtttgattaaattggatgtttcaggaactgcccttgcaacagttgctaatatcaaagaaaatccaaagaacttgaaaatcactgaattggatgctagccaaacagctcgttcattgtcatcagttgacgctgctgttgtaaacaataccttcgttacagaagcaaaattggactacaagaaagcacttttcaaagaacaagctgatgaaaattcaaaacaatggtacaacatcatcgttgcgaaaaaagattgggaaacatcacctaaggctgatgctatcaagaaagttgttgcagcttaccatacagatgaagtgaaaaaagttatcgaagaaacatcagacggtttggatcaaccagtttggtaataagaaacagggaggtgggagagaaaattccacctcttgcttttgtataaagcatggattgtcaggaagagtagctcatagaaaggtagagagaatatggtttttcctagcgaacaagaacagattgaaaaatttgaaaaggatcatgtggcccagcattattttgaggttttgcgtaccttgatttctaagaaatcggtctttgcccagcaggtcggacttaaggaagtcgcaaattatctgggcgagattttcaaacgtgttggggctgaagtggagattgatgagacttatacggctccctttgtcatggcgcatttcaagagttcgcgcccagatgctaagaccttgattttctataaccactatgacactgttccagcggatggggatcaggtctggacagaggatccttttacgctttcggtccgcaatggcttcatgtatgggcgtggagttgacgatgacaagggccatatcacggctcgtttgagtgctttgagaaaatacatgcagcaccatgatgatttgcctgtcaatatcagttttatcatggagggagcggaggaatcggcttcgacagacctagataagtatctggaaaagtatgcggataaactccgtggggcggatttgttggtctgggaacaagggaccaaaaatgccttggaacagctagaaatttctggtggaaataaggggattgtgacctttgatgccaaggtgaaaagcgctgatgtggatatccattctagttatggtggggttgtggaatcagctccctggtacctccttcaagccttacagtctcttcgtgccacagatggtcgtatcttggttgaaggtttgtacgaagaagtacaagagccaaatgaacgggaattggccttggtggacacttacgcccaacgaaatccaggggaaatcagccagatttatggtttggaattgcctctcttacaagaggaccgtgcagcctttctaaaacgtttctttttcgagccagcccttaatatagaagggattcagtcaggttatcaaggacaaggggttaaaacgattttgccagcagaagctagtgctaagctagaggttcgtttggttcctggtctagaaccgcatgatgttctgggaaaaattcggaaacagctagacaaaaatggctttgataaggtagaattatactataccttgggagagatgagctatcgaagcgatatgagcgcgccagccattctcaatgtaatcgagttggccaagaaattctatccacagggcgtttcagtcttgccgacaacagcggggacagggcctatgcatacggtttttgatgccctagaggtaccaatggtggccttcggtctaggaaatgctaatagtcgagaccacggtggggatgaaaatgtgcgaatcgccgattattacacccatattgaattagtagaggagctgattagaagctatgagtagagatattatcaagttagatcagatcgatgtgacttttcaccaaaagaagagaaccatcacagcggtcaaggatgtgaccattcacatccaagaaggggatatctacggaatcgttggatattctggagcagggaaatcaacccttgtacgggtgattaatctcttgcaaaagccatctgcagggaaaattaccattgatgacgatgtgatttttgatggcaaggtgaccttgacggccgagcagttgcgtcgtaaacgtcaagatattggaatgattttccagcattttaacctgatgagccaaaagacagcagaggagaatgtagcctttgcccttaaacactctggactcagcaaggaagaaaagaaggctaaagtagccaagttgttggacttggttggcttggcagaccgtgctgaaaactacccttcacaactatctggagggcaaaaacagcgtgtagccattgcgcgtgccttggccaatgatccaaaaatcttgatttcagacgagtcaacttctgcccttgaccctaagacaaccaagcagattttggccttgttgcaagatttgaaccaaaaattaggcttgacggttgtcttgattacgcatgaaatgcagattgtcaaagacattgccaatcgtgtggcagtcatgcaggatgggcatttgattgaagagggcagcgtccttgaaatcttctcagatcctaaacagcctttgactcaagactttatctcaacagccacaggaattgatgaagctatggtcaaaattgagaagcaagaaatcgtacaacatttgtctgaaaacagtcttttagtgcaactcaagtatgcaggtgcttcaacagacgagccacttttgaatgaattgtacaagcattatcaagtaacggctaatatcctctatggaaatattgaaatcctcgatggtactcctgttggagaattggttgtggtactgtctggtgaaaaagcagcgttggcaggtgctcaagatgccattcgtcaagcaggcgtacaactaaaagtattgaagggaggacagtaagatggaatcattgattcaaacctatttgccaaatgtctataagatgggctgggctggtcaggcaggttggggaacagccatctacctaacactctatatgacagttctttccttcatcatcggagggttcttggggctagttgtaggtctcttccttgtcttgacagcgccaggtggtgtcttggaaaataaagtcgttttctggattttggataaaatcacttctattttccgtgcggttccatttatcattctcttggcagtcttgtcacccttctctcatctaatcgtaggaacaagcattggtccaaatgcggctatcgtaccgctatcttttgcagtctttgccttctttgctcgtcaggtgcaggttgtcttggctgagctagatggtggtgtcattgaggcggctcaagcgagtggagcgaccttctgggatatcgtaggtgtttacctatccgaaggtctgccagatttgatccgtgtgacgactgtgaccttgatttctcttgttggagaaacagctatggctggtgcggttggagctggtggtatcggtaacgtagccattgcttatggatttaaccgctacaatcacgatgtaactatcttggcaaccattattatcattttgattatctttgcaatccaattcttgggagacttcttgaccaagaaattgagccataaataaaaaagagccgtctggctcttttttagtaatcagattttctgtgccaattttttactcaaggcttgtccaatcaaggcacccactagggctccgatgataatacttgcgataaatagaaggacggttccagggtttggagcaaccatgatacggtcgatatattcttgtgattttcctcttgctagaagggttgccatataggttttgggcgcaatccacataagtaagattgggccagttgagctgaaggcaaaaataataaaagaaagaaagttctttgtttggtccttgtattttccgaggctagctactgcatctgctagcaggccacagataattccaggaaggaaggcaccggcaccgtgtttagttcccaagaaaaagagagcaatgacaaggccgatagtggtaatggctccaaaacgtggaacttttgcgattagaatcatatagacgccaccgccgacaagggcagtaaaagcaggcgcataaaacatgtttccagtttgatcaaagagattgcccaaaaggacaccaatccccatggagaggaagtaaagaactgcaaaaagcagtgtagttaagatagatttcttcatgaattgtctcctgataattttttcacaattctcattgtatcacggtttgaagggattgtaaatgggcactagaagtttttgaaaacgcttgaaatatgatataatagtttcatagttatttttaggaggatatcatggggagatttttagactttgtctttaatcgtttctttttagggatgattgcgacagccttcttttggctattaactttagcaggagggattatccttggtctagcgccggctagtgccaccttgatgagcctatatgcagaacatggttatagctttcgggaatacagtttgaaggaggcgtggtctctttataagcaaaatttcgtctcaagcaacctgattttctatagctttttaggggtgaatctagttttggtctatggcctgtatctcttggtgcaattgcctcatcagactattattcatttgattgcgacctttttgaatgtcctagtagttgccctgatctttttggcttatacagtatctttgaaattacaagtttattttgatttgtcctatcgaaatagtctcaaactatccttgattggcatctttatgagcctagcggctgtggccaaggttctccttgggacagtgctacttgtggcaattggttactatatgcctgccctacttttctttgtaggaattgggatgtggcatttctttatcagtgatatgttggaaccggtctatgaaagtatccatgaaaaattggcgacaaaatagaatgaagcagttttggctacatacgcttctaagaacctacagttcagttatgatgattattattgcgagttttgcaatcttactctcttacgctgactgggattcacgggaaaaggaagctcaaagagtagcccaacgtgtaaccactcgaacagtcgatgaggtggagtattattatcgggagtcagcccaactggcgcaagatttagtagccaatcaagaccggatacaaggggtttataagtactttagcttgtcaacttctgagtatttttattggctattggagcatcaagcagcttcgtcaacttctatttctctgtatgaaaacattgatgatctttatgtccaaaatgactctataacgggtgttgcaatcgtcttgcaggattttaaagaagtttatgtttcaacaagggataaaagaagtggtcatgtcttgcctgctgaggcctttaaaccagaggccaatagttttggcattccagttctggacccagcaacggatcaatctataggagtgatttacatctccttggatccagaagtcttatatcatgccattgacaatacccgaggtcatatcccgatggctgtgactgtgacatcaccatttgatacggagatttttcatattggtgagagggtcaatagggaacatgagaactggtttgtcggttttacctctcatggatatcaggttcaggtggcagttcctaaaaactttgttttacaaggaacagtggctagctctgctttgattgtgggcttgagccttctctttattgtcattctctatctgactttgaggaagacttttgctaattatcaaaagcaggtagtggacctggtggattccatccaagctattgccaaaggacaagaaggtcttcgcattgatacgcttgaaaaggatcaggaattgctcctaatctcggagacgaccaatgatatgttggatcgcttggaaaagaatatccatgatatttatcagttagagcttagtcaaaaagatgccaatatgcgggccttgcaggcgcaaatcaatcctcacttcatgtacaatactctggagttcttgcgtatgtacgcagtcatgcagagtcaagatgagttggcagatatcatttatgagtttagtagtctcttgcgtaacaatatttccgacgaaagagagacccttctcaaacaggaattagaattttgtcgtaaatacagctatctctgcatggttcgctatcccaagtccattgcctatggtttcaagatagacccagagctagagaatatgaaaattcctaagtttaccttgcaaccgctggtagaaaactatttcgcgcatggtgttgaccatagacggacagataatgtgattagtatcaaggcgcttaaacaggatggttttgtggaaattttggtggtcgataatggccgtggtatgtcggttgaaaagctggcaagtattcgagaaaaattaagtcagagacattttgaacaccaagccagttacagtgatcaaaagcaatctatcgggattgtcaatgtccatgagcgttttgtgctctattttggggaccgctatgctattactatagattctgcagagcaagcaggtgttcagtatcgtattacaattcaagatgagtagaaagggagaaaatgtataaagtattattagtagatgatgagtacatggtgacagaaggtctgaaacgtttgattccctttgataagtgggatatggaggtcgtcgcaacagccagtcatgccgatgaagccctagaatatgttcaggaaaatcctgtcgatgtggtcatttccgatgtcaatatgcccgacaaaacagggcttgatatgattcgggagatgaaagaaatcttaccagatgcagcctatatcctactttcgggttatcaggagtttgattatgtaaaaagagcaatgaaccttagtgtggtggactatttggtcaagcctgttgataaggtagagctgggaaatctgctggagaagattgcaggtcagctcggcgagagaggaaagaaaagtcagacccttagtcaagatttagatgaggatggatttgttagttatttaggggataaggagaattggtggataggtctatccaaggaaaagcaaggctccttcaccattccctactatgtcttgggtcaagattggcagatttttatttctgatcaacccctagatggtttagtcgttactccctttgaagctccttatcaagaacactttgaacgctggaagctgaatgctgagaaagccctcttttacggctctgtaaatctacaacagtctgagagtctctttacctattacgaaccgatttatagggttatcattcagggaaatctcaatcaaatcgtagaagagttaaatctcttggagaaggtggttcttgaaaatacgccgcgtgttccgattaccaaacagctttttatccagtttgtcatggatgtcttccacttgtttgaacacctcaaagctgatgatatgacggacattgtcaaaaccattcatgctattcaatccttcgatgaattggttccttatatcaaggaaactctgactcgattctttgggcaatatcgaatgaatgaaaatgtggttagtgtgctagaagttattggtcgtgattatcagaaggaactttccctcaaggatatcagtaaggatctttttatcaatcctgtctatctggggcagttgattaagcgtgaaaccaattcgaccttcgcagagcttttaaataaacaacgcattaaggccgcccaacagctcttgctttcgactagtgacagtatcgaagatatttgttatgctgttggttacagtaatgttggatatttctataaagtattccgaaaattgtgcggaaaatcgccgaaagcctaccgaaaacaggtagaaacgacactataatatttgtatccctttacaaaaagtgctataatatcaataataatatcaggaggttctattatgaaaaagaaaccaatttatctatgggtcttgctaatcttgtctgctcttatttcagctatgtctctgtttggaatgttgagtcccttgcctagcaaagaagtccttcgtgctaaacagtcacatgttgcaggacttagtgcccagcaattagaagacaacatcaattacacctatagagtagcagaatcatctcattctatttttaatatggccttgattgtactatctgctattttagttgtagtagcgattgtcttccttgttcgtaagaatttgcaatatgcaaactatacttatgtcggctatgttttgctagccattattggttcgatttatggctatgttagtttacaagacgctgtgcagttagttcacgatgagaccatgcgtttagggataagtgttatttcacaagccgttagcattttctatatcgtcatcaatgttcttttcttagcccttgtcttctataagatgtggcgtcaacagaaagccttggcggaagaagaggaaaccgaagaacttgcctaagtattgacaaaaaataactatcaagttacaatcttggtagttatttttcgattatacataaaatcatggaggtacatatgaagacaatttctttagtttatattagtctgagtggcaatactgaaagttttgtgacacgcttgaaagactatctcttgtcccagtacgaggggattgaggttcaaaagattcatatcaaggatttggtcaaagaaggccaagatttctatgaaatggaccatccctatgtcgcttttttaccgacctaccttgaaggtgggaatggcgtggataacggagatgttgagatattgacaacgccagtgggagattttatcgcctatggtaataatgctagtaagtgttttggagtggttggttcaggaaatcgtaactttaataaccaatactgcctgacagctaagcaatacagtcaacgttttggtttccctgtattagccgattttgaaatgcgaggtatgctgggagatatcaaacgtgtcgcagctattatcgcagatttgtatgagttggaaagttaagcttaggcttggcttttttattatcttaggcagttgtatcagcattcttactttttatgcttcaagagttgattgatatggtccacttttttagcttctcttttatagagaatagcccaaatgatgaggtagacaatcgcaaactcgataatgagctggagatagaagatccagtgaaaaggaaaccaacctgccagagttgctagtgggataaagccagccagcatgaggaagaaatgggtcatagttgcacggagcaagctccagtcacggctgaataatcgtttaccaaagttgaagagaataccgatggctgcccagataagagtacagtagagcaagaccaaggcaccgtgaacctgatgttgagccatcacttgtccgatcagagattcaggactcagtggtgcgtaggtatttggtgcataaatgagtgaaaagatgatagagaggatgaggccgatgaggacaccagcagctgcgtcgtggaagatttgttttttcatagttctaatttctccttgatggtttttagataacggcgtgaagaataggtgaagctttcgtttttcaagaaaatttctactaggccgtttggggttagcttgagatgagagatggagttgatattgatgatttctgattgggaaatttggataaaattggttggcagaatttcaagaacctgatagagtcgtaaatcaatattgtaggtctggctagccgtttctgcaagaaccttccgattctcgatatagaagcgctgtatcttaccaatcttaactagatagacctgatcatcaatctttcctttgattgtttctttttggtccagattttctgcgaactcgatgactttctggattttatcggtttcttgaggtgcttggacaatcagcttttcctccttgtaagtttcactaatctgtagttctactttcataaatttctctccttgtttttcatacaaaattgtgatcacttattgtacacctttattaaacactattttacgatacctgacaagggactttgtttatgtggagggatttggctcctatgtggtggagcttttctgtcctttctgaaatatggtataatagcactaatcaatttctaggaaaatagatacagaaaggggctgaaagatgtctcatattattgaattgccagaggtgctggcaaaccagatcgcggctggagaggttatcgagcgtccagctagcgttgttaaggagctagtagaaaacgccattgacgcgggctctagtcagattatcattgagattgaggaagctggtctcaagaaaatccaaatcacagataatggtcatggaattgcccacgatgaggtggaattggccttgcgtcgtcatgcgaccagtaagataaaaaatcaggcagatctctttcggattcggacgcttggttttcgtggtgaagccttgccttctatcgcttctgttagtgttttgacccttttgacggcggtggatggtgcaagtcatggaaccaagctcgtcgcgcgtgggggagaagttgaagaagtcatcccagcgactagtcctgtgggaaccaaggtttgtgtggaggacctctttttcaacacgcctgcccgcctcaagtatatgaagagccagcaagcggagttgtctcatatcattgatattgtcaatcgtctgggcttggcccatcctgaaatttcgtttagtttaatcagtgatggcaaggagatgacgcggacagctgggactggtcaattgcgccaagctatcgcaggaatttacggtttggtgagtgccaagaagatgattgaaattgagaattctgacctagatttcgaaatttcaggttttgtgtccttgcctgagttaactcgagccaaccgcaactatatcagtctcttcatcaatggccgttatataaagaacttcctgctcaatcgtgcaattctagatggctatggcagtaagcttatggtaggccgttttccactggctgtcattcacattcatatcgacccttatctagcggatgtcaatgtacacccaaccaagcaagaggtgcggatttccaaggaaaaagaactgatggcgctggtctcagaagctattgcaaacagtctcaaggaacaaaccttgatacctgatgccttggaaaatcttgctaaatcgaccgtgcgcaatcgtcaaaaggtggagcagaccattctcccactcaaagaaaatacgctctactatgagaaaacagagtcgataagatccagtcaagctgaggtggctgattatcaggtagaattaactgaggaagggcaagacttgactttgtttgccaaggaaaccttggatcagctaaccaagccagcaaaactgcattttgcagagagaaagcctgctaactacgaccagctagatcacccagagttagaccttgcgagtcttgataaggcttatgacaagctggagcgagaagaatcatccagcttcccagaattggaatttttcgggcaaatgcacgggacttatctctttgcccaagggcgagatgggctctatatcatagaccagcacgcggctcaggaacgggtcaagtacgaggaataccgtgaaagtattggcaatgttgaccagagccagcagcaactcctagtgccctatatctttgaatttccagcggatgatgctcttcgtctcaaggaaagaatgacacatttggaggaagtgggcgtctttctagcagagtacggagaaaatcaatttatcctgcgtgaacatcctatttggatggcagaggaggaaatcgagtcaggcatctatgagatgtgcgacatgctccttttgaccaaggaagtttctatcaagaaatatcgagcagagttggctattatgatgtcctgcaagcggtctatcaaggccaaccatcgtattgacgaccattcggctagacagctcctctatcagctctctcaatgtgacaatccctataactgtccccacggacgccctgttttggtgcattttaccaagtcggatatggaaaagatgttccgacgtattcaggaaaatcacaccagtctccgtgagttggggaaatattaaactaaaaggaaaactatgtacgaatatttaaaaggaatcattaccaaaatcactgctaaatacattgttcttgaagtcaatggtatcggttatattttgcatgtggccaatccttatgcctattcaggacaggttaatcaggaggctcagatttatgtgcatcaagtcgtgcgtgaggacgctcatctgctttatggatttcgctcagaagacgagaagaagctctttctcagtctgatttcggtttctgggattggtcctgtgtcagctcttgctattatcgctgctgatgacaatgctggcttggttcaagcaatcgaaaccaagaacattacctacttaaccaagtttcctaaaattggcaagaaaacagcccagcagatggtgttggacttggaaggcaaggtagtagttgcaggagatgactttcctgccaaggtcgcagtgcaagctagcgctgaaaaccaagaattggaagaagccatggaagccatgttggctctgggctacaaggcgaccgaactcaagaaaatcaagaaattctttgaaggaacgacagatacagctgagaactatatcaagtcagcccttaaaatgttggtcaaataggagcagagcatgacaaaacgttgttcttgggtcaagatgagcaatcttctctatatcacctatcatgatgaagagtggggccagcccctccatgatgatcaagcattgtttgagttattgtgtatggaaacctatcaggcaggcctgtcttgggaaacggtgctcaacaaacgccaagctttccgtcaagcctttcatggctatcaaattcaagcggtggcagacatgaccgacaccgagttggaagccttgctggagaatccagccatcattcggaatagagccaagatttttgctactcggactaacgcccaagcatttctacgactacaggcagaatatggctcttttgatgcctatctttggtcttttgttgaggggaaaactatcgttaacgatgttcccgattaccgccaagcccctgctaaaacacccttgtctgagaaattagccaaagatctcaaaaaacgaggtttcaagttcacaggcccagtcgctgtcttgtcttttctacaagcagcagggctagttgatgaccatgagaatgattgtgagtggaaaagcggtcactagtgtgtacaggtaactagcatatctgagaatatataaaaagctgagaaatttttcccagctttttatatatactattagattggttagagtgaagtcagaaaagtgattccacctaaaataacaccagctgaatttggaatgatgagtatccaatccttcttaggttcctttgtccatccataaataacccagattaagcaagatattgcagctgataaaggttgaaatggttgagctttatttccctgtaaattagcgataatttgaggtatgtaggcaataaatactataattccaataaaggcaccaatagaacctacgattcgattaattttttgttttgtcatatacacctccttcaaaaggatatcatagaaattagcgaaatgcaataaattcagatacaaattgtaacgaaaaccaatacaaaagcacaaaaatagagaaactatttattttttgttatagtcaaagcgaatgacttgctcttttgcatctacgtgggcgtggactccgaagggaataatggctcttggagttgcgtggccgacattgagattatagacaatcgggatattgctgccaatgatatccaatagtgcctctttatagtcgtcatagaaagtttcatccataggttttccgaccaggagtccactgatgccctcgaatatgccagtgtcttttaaagttcgcaacatctttttgaagtcttctggctcaggcttttcttcgcttgtttctagcaagaggatttttccttcccagtctgacaagtcagggaaaagtttgtatttttgacagagctccgtgctatctgcgtatcgagagttgtcaaagatatcgtagagggattcgaggcaaccaccgaggatttttccctcgaactgggcatttccttgcaacaactcaaaaccggtatttgtatgactgacacgaggtgtccccagagccttgggactgaagtcagtcctttcatcataccaaacgtcactagagcggatttctgagattcttcccgtctcaatcaattctttaaagtagtgaaggctataggttagcatttctttttctaattcacaaatgtctgctaagaaggattgaccataaaaagtcttgattcctagtttatgcaacatgagatggttcatggttgtatccgagaagccaagaaaaattttttgtttgataaccttttgtagttggtcattttcaaaaagataagatagtaggcgataggtatcatctccaccgatggcacataggatcatatcgatgctatcatcagaaaaggcatgaatcaaatcctctgcacgcgcttcaggatggttcttgataaagtctaatccatttagagaatggggcaaaaagataggattgagtcccagatccttgagacgttggacacccaagtccacttcgtgtttgacaaagtcctctccgataatgccactagataaactaacaataccaatagtagaaatcatatcttatcctcctagaattagattgagcctattttatcacaaaagattagatagagctatgtgggatgtcataagaatacttttaaatcaagaaagtagtaaaaaagcaaccgcatctgcagttgcttttatgattcttcttaatagcgtgttggtcctgcacttgcgctgcggatattcaagcgtttcttgagatagaagcgaagggctaggagggctgctccgataatagccagtggcaatggagcaagtactgggttaaggctagctggtaggaagcttgttgcaaagaagacaagcaaccaaaggaacatagaagctaggataaccagtacagatttccagaaaggtggacgttggctgcggtccatatctggtccatagtattggtaaacaaagtagtacatcaagtagaaggcaaatccaccaacaagtccaactagcaggagagtgacaagtccatagccgaaagcctgatctgctgcaaagaaagttgtgagggcactgacgagggcaaagaggctagtgatgaaaagggctgagtccataatcatgagttttggatcatcattttcttttggatgctctttttcatattgttccttgacagtgaaactatgagcccagtgggtcggtgcgccatagagggaacgagcagtcgtacccttggcttgctcttcaaggattttgggaatgacttcctcaaaaatagccttgatttcagcgtctgttttcccatctttgatgaattgttgggtagcgatgtggacaaactcttggtttttcttagttaatttttgtagatcaatctgagacataggaactcctcttagaaccattttttatggatgagatagagagtgagcgagacactcatagcaaaggcgataaagacgattaaccagaaggcatttggctcgccgtttagggggatttcattatccttaaagttcatcccgtaggcagaaaagaccatggttgggatggacatgacgatggtcacaagggccaaggttttcataatgttgttctggttgttggaaatgatagaggcaaaggtctctgtcatagagtgcaagacatttccataaatgtctgccatttcgatggcctgttgggtttcaatcagggtgtcttcaagcaggtcttcgtcttcaaggtatttcttgatattgctggttgagctggtcaatttcttaatcacacgctcatttgttttgagggaagccttgaaatagacgatggttttttccaattccatgagctcaatcaattcttcattacgagttgattgatgcagttgactttcgatttgttcactcttacggtcaatcgaacgaagggctgttaggtaaagctctgcattgcgatagagaatctgaaagataaaacgtgaacgcatgaaggtgtagaaattacgcaatcgacggttgataaagacatcgaggaccggtaatggttccaaacaagtagtgatgatggtttcctctgtgatgataataccaagcgggatggttacgtagtaggtgcgattatttctttcttctgtgaccggcacgtcaacgataatcagggtgtactcgtcttcaatcgtaatacgagacatttcttccgcatcgagcggtgctcgaaggtcggcaatatcgatatcgaaggcgttggcgatttcgagtgattcattttgagttggattgacgagattgatccaagtacccggttcaagtgtatcgatctctttaaattcagttgttgtagagagaaaaacttgtttcatatcccttatcctttctcatttttcagattttttcacaccgtactattatactacaaattaagtcttttgggtaatagaatctcactttttttggtataatggtaagcaataatggactagaaagaacaaaaatgcaagataaaattgtcattcatggggcgcgtgcccataatttaaaaaatattgatgtggagattccgcgagacaagttggttgttgtgaccggtttgtcaggttcagggaaatccagtctggcctttgataccctctatgcggaggggcaacgtcgctatgtggagagtttgtcagcctatgctcgtcagttcttggggaatatggagaagcctgatgtagatgctattgatggtctcagcccagctatttctatcgaccagaaaacgactagtaaaaaccctcgctcgacggtgggaacaacgactgaaatcaatgactatctgcgtctcctctacgcacgtgtggggacgccttactgtatcaacgggcatggagctatcaaggcctcttcagtggagcaaatcgtggataaggttttagaattgcctgaacgccagcgcttgcagatcttggcccctgtcatccgcaagaaaaaaggccaacataagagtgttatcgagaaggttcagaaagatgggtatgtccgtgtccgtgtggatggggaagtctatgatgtgaccgaagtgccagagttatctaagagcaagcaacacaatattgatgtcgtggttgatcgtattgttatcaaggagggcattcgtagtcgtctctttgattctattgaggctgcccttcgtatcgcagaaggctatgtcattatcgacactatggacgactctgagttgctcttctctgagcattatgcctgtccagtttgtggctttactgttccagagttagagccgcgtctcttctccttcaatgctccttttggttcttgtagtgagtgtgatggcttgggcatcaagctggaggtggatactgatttggtagtgccagatgccagcaaaaccttacgtgagggagccttggctccgtggaatcctatctcatccaactactatccaaacatgctagagcaggctatgacagcctttggagtggatatggataagccttttgaggacttgtcagaagaagataagaacttgattctctacggctcagatggtaaggaattccatttccactatgagaatgaatttggtggcgtgcgcgatatcgatattccttttgagggagttgttaataatatcaaacgtcgctaccatgaaactaatagtgactacactcgcacccagatgcgcctttacatgaatgagctgacctgcggaacctgtcatggttaccgtctcaatgaccaggccttgtctgtccgtgttggtggtgcgcaaggaccacatatcggagaaatttcagacctgtctatcgcagaccacttggaattagtcagtcagttgactctttctgaaaatgaagccatcattgctcggcccattctcaaggaaatcaaggaccgtttgactttccttaataacgtgggtcttaactatctgactctgtctcgttcagcaggaactctttcaggtggggaaagtcagcgtattcgcttggcgacccagattggttctaacctatcaggtgttctttatattctagacgagccgtcaatcggtcttcaccagagggataatgaccgtctgattgccagtctcaaaaagatgcgtgacttgggcaatactcttatcgtggtggaacatgacgaagataccatgcgtgaggctgattatctgattgacgttggtcctggtgcgggtgtttttggtggggagattgttgcggcaggtacgcccaaacaggtagctcgtaacagtaagtctatcacaggccagtacttgtcaggcaaacgtgccattccagtaccagaagaacgccgtgttggtaatggtcgttttatcgaggtgacgggagcgcgtgagaacaacctgcaaaatgtcacagctcgcttcccactaggaaaattcatcgcagtgacaggggtgtcgggctcagggaaatcgaccctaatcaatagcattctcaaaaaagctattgcccagaagctcaaccgcaattcagacaaacctggtaagtttaaaacgattacagggattgagcatgtagaccgcttgattgatattgatcagagccctatcggacgaacgccgaggtctaaccctgctacctatacgggagtttttgacgatatacgtgacctctttgcccagacaaatgaggctaagattcgtggttacaaaaagggacgtttcagtttcaatgtcaagggtggtcgttgtgaagcctgctcaggtgacgggattatcaagattgagatgcacttcttgccagatgtttacgtggcttgtgaagtctgccacgggactcgctacaatagtgaaaccctagaagttcattacaaggaaaagaatatctcgcaggtcttggacatgactgtcaatgatgcggtggaatttttccaacacattccgaaaattcaacgcaaacttcagactatcaaggatgtagggctaggctatgtgacgctaggtcaaccagctaccactctttctgggggagaagcccagcgtatgaagctggctagcgaactccacaaacgctcgacaggcaagtcattctatattctggatgaaccgacgacaggactccatacagaggatatcgctcgcttgctcaaggttttagctcgctttgttgacgatggcaatacagtccttgttatcgagcacaatttagacgttatcaagacagcagaccatattattgacttgggacctgagggcggtgtcggtggtggaaccatcatcgcaacaggaactccagaagaagtagcggccaatgaagccagctacacaggacagtatttgaaaggaaagttacatcatgaataaacgtgtacaagcatttctagctaaaatgcaagaaaaagaactagatggcatcatcatcaataaccttaaaaacgtctattaccttactggtttttggggctcaaacggaacagtctttatcagccgtgaccgtcaggtcttggtgacagactctcgctatatcattgcagctaagcaagaaaccagtggctttgagattgtggcagaccgtgatgaattggctgtcattgcaggaattgtcaaggacatgggcttgtctcgtatcggttttgaagatgagatttcagtgtcttattatcaccgtatgcaggcaacctttgaaggaattgacttgcttccacaaactcagtttgtcgaaggtcttcgaatgattaaggacgaggcagagattgcagctattcgcaaggcttgttctatctcagaccaagctttccgcgatgcgcttgactttatcaaaccaggaaagactgagattgagattgccaacttccttgacttccgtatgcgtgagttgggagcatctggcttgtcttttgatacgattctagctagtggtatcaactcttccaaacctcatgctcatcctatgcacaaaccagtggagctgggagaagccattactatggacttcggttgcctttatgaccactatgtcagtgatatgacacggactatctatctggggcatgtcagcgacgagcaggcggagatttacaatacggttttgaaagccaaccaagccttgattgaccaggctaaggcaggattaggtttccgagactttgacaaaatccctcgtgatattattatcgaggcgggctatggcgactactttacccacggtattggacacggtattgggctggatattcatgaggaaccttactttagccaaacttctacagaaattattaaggcaggtatggccttaaccgatgaaccaggtatctatatagaaggcaaatacggtgttcgtatcgaggatgatatcttgattacagagaccggttgtgaattgttgaccctagctccaaaagagttgatagttatctaagagttaaacaactcaaatgattgacttttaaattttaaaggtttatactgaaaaacgaaaacggtaggtgaggctaccatagggatacggatgactaccgcaaagcagtggagacactactcgttggtcaacagtcctggtcgcgaaggccaagactaagctcattacattgccctatggagttaaagcttgaacgaaaaacagataattagttttttaatcctgccattttatggtgggattttctactgtttaaatcaaagaaaggagatagacgatgcaaattgacgatcatccggaaccgcacatacacagccaatcgctgatttgtgtcattctgcccttataaagtgattggtctctgtgtatgaaacacatcattcatacagataggagaaaccaatgaaaactacaaaagaaagattagcaacagctattcatacatctttaaacgaaactctatctttttataagacaagtctaacaggcttgactgaggagcaggtggagaaaaatcgtgacctatatggcgaaaataccatcacaaagggtcaagaagaaagtatcctcaaaaagatttacgaatccattatcaatccttttacgatcatcttactggtcatcgccgtgatttccttggtgaccaatgtctggttggcaaaaccaggtcaagaagatccgacaacttccattatcatcgttgtcctagtcctcatttctggtggcatacgctttgtccaagaactccgtagtgataaggctgcgactaatctatcaaaaatgattgtcaacacagcgactgtcattcgtcaaggagaaatccaagaagtacctatcgatgatttggtagtgggtgacgtggttaaattaagcgctggagacatgattccagcagatcttcttttatttgagtcgcgcgatttctttgtacaacagtcgggcttgacaggtgaaagtgaatcggttgaaaaattggccttgaccaaggcaacagttcaacaatctgatagtctgctagaagcagaagcgctcgcctttatgggaaccaatgtcttatctggtagtgccaaggccgtggttttagcagttggtgatgataccatgatgggagccattgagcagactttgaacacctatgaagagcctacttcgtttgagcgggagatgaatagtatttcgtggctcttgattcgtttgatgctggtcatggtgcccatcgttttcttgtccaatggtttaacagatggtgactggctggaagctggcgtatttgctttga

SEQ ID NO: 57 - DNA, 81409 bp, Streptococcus mitis NCTC 12261 contig3
caaacctcatgctcatcctatgcacaacccagtggagctggagaagccattactatgactttcggttgcctttatgaccactatgtcagtgatatgacacggactatctatctggggcatgtcagcgacgagcaggcggagatttacaatacggtttggaaagccaaccaaagccattactatggacttcggttgcctttatgaccactatgtcagtgatatgacacggactatctatctggggcatgtcagcgacgagcaggcggagatttacaatacggttttgaaagccaaccaagccttgattgaccaggctaaggcaggattaggtttccgagactttgacaaaatccctcgtgatattattatcgaggcgggctatggcgactactttacccacggtattggacacggtattgggctggatattcatgaggaaccttactttagccaaacttctacagaaattattaaggcaggtatggccttaaccgatgaaccaggtatctatatagaaggcaaatacggtgttcgtatcgaggatgatatcttgattacagagaccggttgtgaattgttgaccctagctccaaaagagttgatagttatctaagagttaaacaactcaaatgattgacttttaaattttaaaggtttatactgaaaaacgaaaacggtaggtgaggctaccatagggatacggatgactaccgcaaagcagtggagacactactcgttggtcaacagtcctggtcgcgaaggccaagactaagctcattacattgccctatggagttaaagcttgaacgaaaaacagataattagttttttaatcctgccattttatggtgggattttctactgtttaaatcaaagaaaggagatagacgatgcaaattgacgatcatccggaaccgcacatacacagccaatcgctgatttgtgtcattctgcccttataaagtgattggtctctgtgtatgaaacacatcattcatacagataggagaaaccaatgaaaactacaaaagaaagattagcaacagctattcatacatctttaaacgaaactctatctttttataagacaagtctaacaggcttgactgaggagcaggtggagaaaaatcgtgacctatatggcgaaaataccatcacaaagggtcaagaagaaagtatcctcaaaaagatttacgaatccattatcaatccttttacgatcatcttactggtcatcgccgtgatttccttggtgaccaatgtctggttggcaaaaccaggtcaagaagatccgacaacttccattatcatcgttgtcctagtcctcatttctggtggcatacgctttgtccaagaactccgtagtgataaggctgcgactaatctatcaaaaatgattgtcaacacagcgactgtcattcgtcaaggagaaatccaagaagtacctatcgatgatttggtagtgggtgacgtggttaaattaagcgctggagacatgattccagcagatcttcttttatttgagtcgcgcgatttctttgtacaacagtcgggcttgacaggtgaaagtgaatcggttgaaaaattggccttgaccaaggcaacagttcaacaatctgatagtctgctagaagcagaagcgctcgcctttatgggaaccaatgtcttatctggtagtgccaaggccgtggttttagcagttggtgatgataccatgatgggagccattgagcagactttgaacacctatgaagagcctacttcgtttgagcgggagatgaatagtatttcgtggctcttgattcgtttgatgctggtcatggtgcccatcgttttcttgtccaatggtttaacagatggtgactggctggaagctggcgtatttgctttgagtgttggtgtcggattaacacctgagatgcttcctatgattatcacggccagtctagcaaaaggctccatcattatggccaaggaaaaagtggttatcaagaaactcaatgccatacaggacttaggggcgattgatattttgtgtacagataagacaggaactctaacccaagacgaaattgtccttgaatatcccttggacatccacggacgcttggatttgaccgtcttgagacgagcttatctcaattcttattttcaaacgggcttgaaaaatttgatggacagagctatcatcaaacggactgaaaaggaagccaaagaacacaccctcttacaaaatctggatcaaacttttcaaaaaatagatgagcttccctttgattttgaacgtagacggatgagtgttatcgttaaggatgaacacgaagttgttagtttggtaaccaagggtgccctagaggaaatgttgacgatttccagtcatgcggaataccaaggagtgattactcccttgacagatgctattagagaagagattttagaggaagtccgacaactaaatcaacaaggtttacgtgtcttgggagtggcctataagtcaggtttgagggaaggtcatgcctatacagttgatgatgaaggggatatgattctaactggttatttagccttcctagatcctcctaaaccatctgcagcaccagcaattaaggctctgttagaacatggggttcaaacaaagattttgacgggagacaacgagaaagttacccaagcagtctgtgaaaaggttggtttagatatcaatcagatgctgttaggatctgaaattgatcagatgagtaatcaagaattggctcaagccgtggaggaggtaacagtctttgccaaactttctcctgaccaaaaagcacgaattattttgcaatttaaggctaatggtcatgctgttggctatatgggagatgggatcaatgatgctccttctatgaaagttgcagatgtggggatttctgttgatacagcagtagatattgccaaagaaacagcggatgttatcctacttgataaggatctcatggtgcttgaaaaaggacttgttgaagggcgtaaggtctatgccaatatgaccaaatatatcaaaatgacagtgagttctaattttggaaatatcttatccctattagtctctggaatatttttaccatttttaccaatggcgccagtccatttgattatcctaaatctagtctatgatttatcttgtatcgccttgccttttgacaaggtggacaaagattttttgagaaatccgcatacctgggaagctaggtccatcacacgtttcatgatttggatgggacctatctcttctgcctttgatattttgacctttattttgctttattttatcattgtacccatgacaacaggtcaagcttatgttcatggggcagagtctgccgtagaatttattgtcttgtttcagacaggttggtttatcgagtccatgtggtcacagaccatggttatccatatgctgcgttcagccaaaattccctttttacaaagtcgtccagcttggctagtccttgtgacaaccttattggctgcagcctttgtgaccttccttccctacagtccactcgcaatcctacttcatctaactccattaaaaccgatttatttcatctttttacttttcatcattattttgtatatgattagcgtgacaattgtgaaaaaaatctatatcaagaaatatcaagaatggctgtaaatttcattttgtcaagaaaaaagtacgaaaatgacgaaaaaagttaaaaaatttaaaaataggtcgcaagtcggatgttttttatggtataatagactaaactgatagtaacatgtagcgaaaggggtaggtacatgattaaaatttatacagtctcaagttgtactagctgtaaaaaagcaaaaacctggctcaatgcccaccagttaagttataaagaacaaaatcttggtaaagaaggaattacgagagaagaattactggatattctaaccaaaacagataacggaatagccagcatcgtttcatctaaaaatcgctatgccaaagcccttggagtggatattgaagatttgagtgtcaatgaagtcctcaatctgattatggaaacaccgagaattttaaagagcccaattcttgtggatgaaaaacgcctacaagttggctataaggaagatgatattcgtgccttcctaccacgctctgtccgtaatgtagaaaatgcagaagcacgtttgcgtgcagctctataaacatcaaggctgggagcaactcccagtcttattttaatttcaaaaagaaagaagaaagaaatgaaaaaaatagttcttgttagtctagctttcctttttgtcctagttggttgtggacagaaaaaagaaactggaacagctacaaaaacagaaaaggatacgcttcagtcggcgttgccagttattgaaaatgccgagaagaatacagttgtgaccaagactttggtcttgcccaagtcagatgatggcagccagcaaacccaaaccattacttacaaagataagacttttttgagcttaacgattcaacaaaagcgtccagtctctgatgaattgaagacctatattgaccaacatggagtggaagaaactcaaaaagctcttctcgaggcggaggagaaggatgaggctatcatagaagctcgtaaattagcaggatttaagcttgaaaccaaactattgagcgcaacagaacttcaaacaaccactagttttgattttcaagttctggatgtcaagaaggcttctcagttagaatatttgaagaacattggtttagaaaatctcttgaagaatgaaccaagtaaatatatttcagacagattggcaaatggcgcgacagaacagtagaaaatccaaataaatagactgcctgaattgtagaacgtaaggaattatgctataatggtactattctaaggaaagagggtgttagaatgggatttactgaagaaacagtacgttttaaattggacgattccaataaaaaagaaattagcgaaactctgactgatgtttatgcttcgttgaacgataagggttataacccgattaaccaaatcgtaggttacgtattgagtggagaccctgcctacgttcctcgttataataatgcacgaaatcaaatccgtaagtatgagcgcgatgaaatcgttgaagaattggtccgctactaccttaaaggacaaggagtcgatctataacctatgagaattatgggattggacgtcggttcaaaaacggtaggggtggccattagcgatccgcttggttttacagctcaaggacttgaaatcatccaaatcaatgaggagcaaggtcaatttggttttgaccgcgttaaggagttggttgatacttacaaggtggaacgatttgtagtgggcttgcctaaaaacatgaacaatacaagcggaccgcgcgtggaagctagtcaagcctacggagcaaagctagaagagctttttggtttaccagtagactatcaagatgaacgcttgacaacagttgccgcagagcgcatgttgattgaacaagcagatattagtcgcaataagcgcaaaaaagtcattgataagttagcagctcagctgattttacaaaactatttagatagaaaattttaatataaaggagaggctatgtcacacgatcataaccacgaccacgaagaacgtgaactaatcacactagtagatgaacaaggaaatgaaaccttgtttgaaatccttttgaccattgacggaaaagaagaatttggtaaaaactatgttcttctagtaccagttaacgcagaagaagacgaagacggacaagttgaaatccaagcttactcattcatcgaaaacgaagatggaacagaaggcgaattgcaaccaatcccagaagactcagaagacgaatggaacatgattgaagaagtcttcaacagctttatggaggagtaaacacgtccagtggacgtgtttagcactgcgctagaaattagaaacgcaggcacatccagtggatgttttaccccaagctaatattcatagtagctagttattagctaaccaggtaagaggtcgggacgaaaatcctggcctcgtttttgttagttatgagactttattgaggcagttgattgaacctgtaattaaggagatgtatatgtttgaagtagaagaatggcttcatagtcggattggtttgaattttcgatcaggtttgggccgaatgcaacaagcggtggatttgttggggaatcccgagaagtcttatcctattatccacgtaacaggaactaatggaaaaggatctaccattgcttttatgagggagttatttatggggcatgacaaaaaagttgcgacctttacttcccctcatatcgtctctatcaatgatcgaatctgcattaacgggcaaccaatagctgatgcagacttcattcgtttggctaatcaggtcaaggagatggagaaaatgcttctgcaaacccatgatcagttgtccttttttgaattgctgaccttgattgcttttctttattttagagagcaagaggtggatttagttctattagaagtgggaattggtggcttacttgacacaaccaatgtggtaattggagagattgctgtcatcacctccatcggacttgaccatcaggagactctgggtgacaatatagcagcaattgcagagcagaaagctggtatttttaaggctggtaaaaaggcagtgattgctaagttgccttcagaagctaggcttgtttgtcagaaaaaagcagactctttagctgttgacctttatcaggcaggccaagatttttcaatgctgaatgggaatttttcaagctctttggctaacctttcacagttgaaaataggtttggaaggagcttatcagcaggaaaatgcggccttggcgctacaaacgtttcttctctttatgagggaaggaaaggaagttgttgatgagcaggttgtaagacaggctttggagaagacccattgggctgggcgtttggagcgtatttgccctcagatttacttggacggtgctcataacctccctgccttgactcgcttggttgaatttattaaagaaaaagagcaggaaggatatcggcctcaaatcctatttggagccttgaaacggaaggattatcaagggatgttgggttacttgactgagaatttgcctcaggtggaactcaaggtgacaggctttgactatcaaggttctttggatgaaacagatgtaacaggttacgatatagttccttcttaccgagaatttattagcaattttgaagcaagagtagatgtccaggatttgttgttcgttacaggttctctctattttatctcagaggtacggggctatctactggggcatgagcagataaattgacctccttttttgaacttgttatactaggaaaactactagttagaaggaaaaacttctgtaaattggtatcagaaaggaaattcatcatgaaattaaaaagattcacactttctcttgcttctctagcaagtcttagtctcttagtagcttgttcacaaagagctcaacaagttcaacaatcagcaactcaaccccaaacacaacaaactcaacaatcacaagctgcttcatcttctacagaaaatacaaatcaggcagcagcaaattcttcacaaaatgtgcccgaggctcaaccaaccaatattgatggaacttataccggtcaggacgaaggagaccgtatcactttagtggtaactggaacaactggtacatggacacaggtagaaactgacggagatcaagaaatcaagcaggttagcttcgatgctgccaatcaacgcatgattattggggatgatgccaagatttatacaattaatggaaatcagatgattatcgacgatatggatagagaagcgtctgatcgcattgttttatcaaaatagactagaaggagactggttttgtcagtctcttttgtttttactcagaaaaatgattataaatacttgccttctaccgaatacctgcgttatactagtattaattacctgtttttagcattcatactcttcgaaaatctcttcaaaccacgtcagcttccatctgcaacctcaaaacagtgttttgagcaacctgcgactagcttcctagtttgctctttgcttttcattgagtatcaaaatatcaaggaggggatatgaaatatagaaaacttcaattattgatgtccaagtatggctttagtctttcgattatgttacttgaactttgtcttgtttttggtctctttctctatttagggcgcatggcccctattctatgggtaattgtcttaatttttatgagtatggcgactattgtcgcaattgtcaatcgctcaatggcacctgaaagtaaagtaatgtggttagtggtaacttttgttcctgtcattggccccttgctctatctaatgtttggtgaaaggcgattgtccaaaaaagaaatcaagcagttggacaaacttggttctatgcattttcgggaggataacagtaaagctctccgccagaaattgaaggaagaggataaggctgcttacggagttatcaaatctttgttaagtatggatagtaacgccgatgtctatgatcgaacagactcacaattcttttcttcgggtgaaagcatgtggcaatatatgttggaagacctcaagaaagctgagaaatttatctttctagagtactatattgtcgaagaaggtctgatgtggaatagcatactagatatactagagcaaaaggcagctcagggtgtagagatcaagatgctctatgatgatatcggctgtatggcgactttacctggagactatactgttcagcttcgtagtcgaggaattgaagcacataagtttaacaaggtgattcctcgtttgacggtggcttacaacaatcgggaccatcgtaaaatccttgtcatagatggtcaggtagcttatacaggagggattaacttagccgatgagtacatcaatcatgtagaacgttttggctattggaaggatagtggggttcgcttagatggccctggtgtcaaggctctcacccgtctctttttgatgacttggtatatcaatcgtggggaaatcagcgattttgaccagtatcacttggaaaatcagccttgttctggccaagggctctgcattccttacggtagtggacccaagcctatcttccgtacccaggtagggaaaaaagtttatcaaagtttgattaatcaggctactgattcagtctatatcacaacaccctatttgattattgactatgatttaactgagagtattaaaaatgcagccatgaggggtgttgatgtccgcatcgtgactcctttcattccggataaaaaattaatccagctcataacaagaggagcctatccggatcttttgtcagcaggagtcaggatttttgagtatagtccaggctttatccacagtaaacaaatcctagtggacaaggactttgctgcagttggaaccattaatctagattatagaagtttgcttcatcactatgaagatgcagttttgctatataaaacggcatcaatcacagagattcaaaaagattttgaggagattttttcagtatcgcaagaaattttccctcatacgataaaaaatagctggtatcaaaaattgattaaggaaattgcccagttattcgcccctatcttataagaaatctaggacttaggacacaaaccagtcctatttttcttgccttttacgaataagaagatgtaggaggaacgatgctgactcagaaggaattgaactatatcacgacatttaaacagacgcatttacaccgatttcgggaaattgaaacctttgtgaaactatgcaaaaaatcgctcaaacagccatcgcaagctgacaattttaggtctttttgatatactaagacagataaattgaataggagaaacgatatggctgtatatggcagaatcgaagaagtatccgaaatgatacagagtgatggaatagaaaatagactggataggaaccttgaatctcatgtagaaaaagaagaacaggtagctttcccgtttttcagactcatcattggaagtacgattgcaacggttttttctgtggtgatacctttacttttagatatggtaagtccctctcaggcgcaggatttgtatatagggtgggctttacatcagggaggacagctctacagtagctattatgctagtcacggtcttatttattacttgctactttacatcacccaaggaggcattctttttgccttggtagaatggctagccctcttaggaggaggttatttcctcttttcttcaactgactatctgacgggacaaagggaacaagccaagcaactcctaaccatattttatattttggtatccggtctcggttttggaggaggatatgctacgattttagctctgccattcctgtttgcaggattttcgttcatagcagcttatctatcaaatcctaaccatgacaaggggtttctacgtctgggaattttcttggctctatcatttttcatagagcctcttacaagtcttctctttattgcagtagtaacgattggtttatttgtctttaatgttgggcatggccgccttgctcatggagtttatcagttttttgcagcagcacttggcttttctctcatcttttacccagtaggatattatgttcttgcttcaggtggttttggagaagctctaggaagtcttttatatccgattgattcccttcaggtctttgcgaatcctcaactaatggataatgttgtattctatggtttgttgacctttggtttaggagctctcttccttgtttttctaggattgttccaatcaaaggcatcaagattatatgttatttcagtaccagctagttttgctttcttatttatactagccttgttgcttttttctcaagaacctcttcacggttcgcgtttgattctaatcattccatttttactgcttcttttgatgaccagtattcgtgggaagcattcagctaggggagttcgtcgtcggagaagagaagaagttcctactctatggaaaaaattcatgaagggaaatctctacctaccgattctagtggtggtttatctgattgctattccttttgtggctcgttttgtcttgcatccagcttcttatagagaacaacatcaagtggtagatagagtcaaacaagagacgagtgatggtgaccaaatctatatttgggattcacatgttcaaatgtataaagaaagccagcgtttggctggatccatgttcccatcacctcttctttacacgagtacagaagagaataaaactagtttaatcaatgacttgaaagaaaacaaacctaaggtgattgtggtaaacgacaaggtggctctctggtctgaggcggagacactcttaaaagaaaattaccaacaagtaaagactgattactcagagtttaaagtctataaaatcaaatagccaaatcaatatcttgtgtatttttaaaaattttaggatttttaacacaagatattgatttttctttttagagtggtataatactttttagaaagaacattttagaaaagagcatgcatatgattgcactagaagaaaaaattacaattttgccaactctcttcgtcgagaaacgagatgggagacgtgttgtatttgatgtggacaagattgacaaggctctccacaaggcggctgacaaggttatggatgtgacacccttggttgaaaagcgcctaaatgctctgaccgagcgaattgtcacagaaattcatagtcgttttccgcagggggttaagatttacgaaattcaaaatatcgtagaacatgaactccttgaagccaaagaatatgcgctagctgaggagtatattacttatcggacacaaagggattttgagcgttcaaaagcgacagatatcaactttagcatccataaacttctcaacaaagaccaggccgttgtcaatgaaaatgctaataaagacagcgatgtctttaatacccagcgtgatttgacggcggggattgttgggaaatcaatcggactgcaaatgctccctaagcacgtagccaatgcccaccaaaagggggatatccactatcatgatttggattatagcccctacacacctatgactaactgctgtttgattgattttaaaggtatgttggagaatggctttaagattggaaatgcagaggtagaaagtcccaagtctatccagactgcgacagctcagatttctcaaattatcgccaacgttgcttctagccagtacggtggctgttcagctgaccgtatcgatgaagttttggcgccttatgcagagaagaattaccaaaaacacctcaaggatgcggaagaatgggtcttacctgacaaacgggaagattacgcttggaagaaaacccaaaaagatatctatgatgccatgcaatctctcgagtatgaaatcaatactctcttcacttcaaatgggcaaacaccttttacttcactaggttttggtctgggaaccaatcgttttgagcgtgaaattcaaaaagctatcttgaacatccgaatcaagggacttggttcagaacaccgcacagctatcttccctaaacttatcttcacgcttaaaagaggactcaacttagaagaagggactcccaactacgacattaagcagttggctcttgagtgtgcaaccaagcggatgtacccagatgtcttgtcttatgataagattatcgaattgacaggttccttcaaggttccgatgggatgtcgttcattccttcaaggatggaaggatgaaaatggagttgaagttaactctggccgtatgaatctaggggtggtgacggtcaatcttcctcgtattgcccttgagtctgaaggtgatatgaataagttctgggaaatctttaacgagcggatgaacattgcagaagatgctctagtttatcgtgtcgaacggaccaaggaagcaacaccagaaaatgctcctatcctttatcaatacggtgcttttggtcatcgtctaggtaaagaagaaagcgttgaccagctctttaagaatcgtcgtgcgacagtttcactaggctatatcggtttgtacgaagtagcgactgttttctttggtaacagctgggaaagtaatccagatgctaaggaattcacgctggatatcattcgtgatatgaaacgccgtgtagaagagtggtctgaccaatatggctatcatttctctatctactcaacaccatctgaaagtttgacagatcgtttctgccgactagatacagagaagtttggttctattcctgatattacagataaggaatactacaccaactctttccactacgatgttcgtaaaaatccaacaccgtttgaaaaattggattttgagaaagtctatccagaagcaggtgcgtcgggtggtttcatccattattgtgagtatccagtccttcagcaaaatccaaaggccttggaagctgtctgggactatgcctatgaccgtgtgggctatcttgggaccaatacaccaatagaccgttgctacaagtgtgactttgaaggggattttgaaccaactgagaggggttttgcttgtcctaactgtggcaatagcgaccctaaaacagtagatgttgttaaacgaacttgtggctatttaggtaatcctcaagcgagacctatggtcaatggccgtcacaaggaaatcgcagcgcgtgtcaaacatatgaatggttcaacgattaaaatagctggccatcaagtaaccaattagaaagaaatgaaatgggaaaatatcaattagacgataaggggcgtgcacaagtgacccgttatcacgagaaacactctaaaggtggagctggtaaaaaagaacgcttgctcaacctcagagaacaatttttaaacaagaacaagaaaaaataaaagtgagagtcaactctcgcttttctcatagtgggaggtaaggatggaattacgcagaccaagattagcagataaagaaacagttttagagatgatgacagagtttgaaaagagccaatcagcccatgatggaggattttgggatacagagaactttgtgtatgaagaatggttggaaacaaataagcaaaaagaaatgggaataaacttgcctgaaaatcgtgttccttctattcaatttgtatcatttgatgatgtaggtcctgctctaggatttttgaatctgcgattgagactgaatgagggtttattgaattatgctggccacattggctactccattcgtccatcagaaagaggcaaaggttatgctaaagagactctccgtcagggcttgcaagttgctaaggaaaagaacatcaagagaactcttgtgacctgtagcgtgaataatcctgctagcagagcagtcattctagcaaatggtgggctccttgaagatgttcgtaatggagttgagcgttattggatagaggtagcgaatgaataatccaaaaccacaagaatggaaaagcgaggatctcagtcaagggcgtattattgattacaaggccttcaactttgtagatggagagggtgtgcgtaactctctctatgtatcaggctgtatgtttcactgcgagggttgttataatgttgccacttggtctttcaatgcaggaattccctacacagcagaattagaagaacagattatggcagaccttgcccaaccctatgttcagggattgaccttgctgggaggggagccttttctcaatactggcattcttttgccactcgtgaagcgtattcggaaggaattgccagacaaggacatctggtcttggacgggctatacatgggaagaaatgatgttggaaactccagataaactggaactcttatcattgattgacattcttgtcgatggacgatacgaccgaactaagagaaatctcatgctccagtttcgaggctcgtccaatcaacgaattatcgatgtgcaaaaatctctcaaaagtgggcaaatagtgatttgggacaaactcaatgatggaaaagaaagctatgaacaggtgaagagagattaactttcttctataaaaatagttaaataaatgacctataaaaaaagaaaacagtttcattgtaaaaaaacaaaaaaacagcaacaaatcccttgcaatcgcaggggctttgtgttattctattatggtgctgtaaattacagccttagctttgatgcaagaggttgcgacacgctcggttgcattgccacgcaacaccgcgtcggttttcttgtggagctagcctattatcttaaatagacgaaaaggagaaaaagatggcaaacaaaaaaatccgtatccgtttgaaagcttacgaacaccgtacgcttgacacagcggctgcaaaaatcgtagaatcagctactcgtacaggtgcacaagttgcgggtccaatcccacttccaactgaacgtagcctctacacaatcattcgtgcgactcacaaatacaaagactctcgcgaacaatttgaaatgcgtacacacaaacgtttgattgatatcgttaacccaactcaaaaaacagttgatgcgttgatgaaattggatcttccaagtggtgtaaacgtagaaatcaaactttaatctaaagcttgataccttgagcataaaaaacgctcgttaaaaactttttgaataaaaaatatagaaaaggaactattttctcatgacaaaaggaatcttagggaaaaaagtgggaatgactcaaatcttcactgaagctggcgaattgatccctgtaacagttattgaagcagctccaaacgttgttcttcaagttaaaactgttgaaacagacggatacaacgctatccaagttggtttcgatgacaaacgcgaagtattgagcaacaaacctgctaaaggacatgtagcgaaagctaacacggctcctaagcgcttcattcgtgaattcaaaaacgttgaaggcttggaagttggtgctgaaatcacagttgaaacattcgcagctggagatgttgttgacgtaactggtacttctaaaggtaaaggtttccaaggtgttatcaagcgccacggacaatcacgtggaccaatggctcacggttctcgttaccaccgtcgtccaggttctatgggacctgttgcacctaaccgcgtattcaaaggtaaaaaccttgcaggacgtatgggtggcgaccgtgtaacaattcaaaaccttgaagttgtacaagttgttccagaaaagaacgttatccttatcaaaggtaacgtaccaggtgctaagaaatctcttatcactatcaaatcagcagttaaagctggtaaataataaggaaaggggaatacagtcaaaatggcaaatgtaacattattcgaccaaactggtaaacaagcgggcgaagttgttcttaacgatgcaatctttggtatcgaaccaaatgaatctgttgtgtttgatgtgatcatcagccaacgtgctagccttcgtcaaggaactcacgcagttaaaaaccgctcagctgtttcaggtggcggacgcaaaccatggcgtcaaaaaggaactggacgtgctcgtcaaggttctatccgctctccacaatggcgtggtggtggaatcgtcttcggaccaactccacgtagctatgcgtacaaacttcctcaaaaagttcgtcgccttgcgcttaaatctgtttactcagaaaaagttgctgaaaataaatttgtagccgttgattctcttgaatttacagctccaaaaactgctgaatttgcaaaagttcttgcagctttgagcatcgattctaaagtccttgttattcttgaagaaggaaacgaattcgcagctctctcagctcgtaaccttccaaacgtgaaagttgcgactgctacaactgcaagtgttcttgacatcgcaaatagtgacaaacttcttgttactcaagcagctatctctaaaatcgaggaggttcttgcataatgaatttgtatgatgttatcaaaaaacctgtaatcactgaaagctcaatggctcaacttgaagcaggaaaatatgtatttgaagttgacactcgtgcacacaaacttttgattaagcaagctgttgaagctgctttcgaaggtgttaaagttgcaaatgttaacacaatcaacgtaaaaccaaaagctaaacgtgttggacgttacactggttttactaacaaaactaaaaaagctatcatcacacttacagctgattcaaaagcaatcgagttgtttgctgctgaagctgaataatctaaggaggaaatatcgtgggaattcgtgtttataaaccaacaacaaacggtcgccgtaatatgacttctttggatttcgctgaaatcacaacaagcactcctgaaaaatcattgcttgttgcattgaagagcaaggctggtcgtaacaacaacggtcgtatcacagttcgtcaccaaggtggtggacacaaacgtttctaccgtttggttgacttcaaacgtaacaaagacaacgttgaagcagttgttaaaacaattgagtacgatccaaaccgttctgcaaacatcgctcttgtacactacactgacggtgtgaaagcgtacatcatcgctccaaaaggtcttgaagttggtcaacgtatcgtttcaggtccagaagcagatatcaaagtcggaaacgctcttccacttgctaacattccagttggtactttgatccacaacatcgagttgaaaccaggtcgtggtggtgaattggtacgtgctgctggagcatctgctcaagtattgggttctgaaggtaaatacgttcttgttcgtcttcaatcaggtgaagttcgtatgattcttggaacttgtcgtgctacagttggtgttgtcggaaacgaacaacatggacttgtaaaccttggtaaagcaggacgtagccgttggaaaggtatccgcccaacagttcgtggttctgtaatgaaccctaacgatcacccacacggtggtggtgaaggtaaagcaccagttggtcgtaaagcaccatctactccatggggcaaacctgctcttggtcttaaaactcgtaacaagaaagcgaaatctgacaaacttatcgttcgtcgtcgcaacgagaaataatattaaactagtcgcttaagcaactagtaaatccgccagctcggtagcgctgcttgtgagcgcaagccgctgtggtacaacatttaaaggagaaaatataaaaatgggacgcagtcttaaaaaaggacctttcgtcgatgagcatttgatgaaaaaagttgaagctcaagctaacgacgaaaagaaaaaagttattaaaacttggtcacgtcgttcaacgatcttcccaagtttcattggttacactatcgcagtttatgacggacgtaaacacgtacctgtttacatccaagaagacatggtaggtcacaaacttggtgaatttgcaccaactcgtacttacaaaggtcacgctgcagacgacaagaaaacacgtagaaaataaggagaacataaatggcagaaattacttcagctaaagcaatggctcgtacagtacgtgtttcacctcgtaaatcacgtcttgttcttgataacatccgtggtaaaagcgtagccgatgcaatcgcaatcttgacattcactccaaacaaagctgctgaaatcatcttgaaagttttgaactcagctgtagctaacgctgaaaacaactttggtttggataaagctaacttggtagtatctgaagcattcgcaaacgaaggaccaactatgaaacgtttccgtccacgtgcgaaaggttcagcttcaccaatcaacaaacgtacagctcacatcactgtagctgttgcagaaaaataaggaggtaaaatcgtgggtcaaaaagtacatccaattggtatgcgtgtcggcatcatccgtgattgggatgccaaatggtatgctgaaaaagaatacgcggattaccttcatgaagatcttgcaatccgtaaattcgttcaaaaagaacttgctgacgcagcagtttcaactatcgaaatcgaacgcgcagtaaacaaagttaacgtttcacttcacactgctaaaccaggtatggttatcggtaaaggtggtgctaacgttgatgcactccgtgcgaaacttaacaaattgactggaaaacaagtacacatcaacatcatcgaaatcaaacaacctgatttggatgctcaccttgtaggtgaaggaattgctcgtcaattggagcaacgtgttgctttccgtcgtgcacaaaaacaagcaatccaacgtgcaatgcgtgctggagctaaaggaatcaaaactcaagtatcaggtcgtttgaacggtgcagatatcgcccgtgctgaaggatactctgaaggaactgttccacttcacacacttcgtgcagatatcgattacgcttgggaagaagcagatactacatacggtaaacttggtgttaaagtatggatctaccgtggtgaagttcttccagctcgcaaaaacactaaaggaggtaaataaccaatgttagtacctaaacgtgttaaacaccgtcgtgaattccgtggaaaaatgcgcggtgaagcaaaaggtggaaaagaagtagcattcggtgaatacggtcttcaagctacaactagccactggatcactaaccgccaaatcgaagctgctcgtatcgccatgactcgttacatgaaacgtggtggtaaagtttggattaaaatcttcccacacaaatcatacactgctaaagctatcggtgtgcgtatgggatctggtaaaggggcacctgaaggttgggtagcaccagttaaacgtggtaaagtgatgttcgaaatcgctggtgtatctgaagagatcgctcgcgaagcgcttcgtcttgctagccacaaattgccagttaaatgtaaattcgtaaaacgtgaagcagaataaggagaaggcatgaaacttaatgaagtaaaagaatttgttaaagaacttcgtggtctttctcaagaagaactcgcgaagcgcgaaaacgaattgaaaaaagaattgtttgaacttcgtttccaagctgctactggtcaattggaacaaacagctcgcttgaaagaagttaaaaaacaaatcgctcgtatcaaaacagttcaatctgaagcgaaataatagactagggaaggagaaatttcaatggaacgcaataatcgtaaagttcttgttggacgtgttgtatctgacaaaatggacaagacaatcacagttgtagttgaaacaaaacgtaaccacccagtctatggtaaacgtattaactactctaaaaaatacaaagctcatgatgaaaacaatgttgccaaagaaggcgatatcgtacgtatcatggaaactcgcccgctttcagctacaaaacgtttccgtcttgtagaagttgttgaagaagcggtcatcatctaatcaaacctgaaaggagaaaactgaaatgattcaaacagaaactcgtttgaaagtcgcagacaacagcggtgctcgcgaaatcttgactatcaaagttcttggtggttcaggacgtaaatttgcaaacatcggtgatgttatcgtggcatctgtaaaacaagctactcctggtggtgcggttaaaaaaggtgacgttgttaaagcagttatcgttcgtactaaatcaggtgctcgtcgtgctgatggttcatacatcaaatttgacgaaaacgcagcagttatcatccgtgaagacaaaactcctcgcggaacacgtatctttggcccagttgcacgtgaattgcgtgaaggtggcttcatgaagatcgtgtcacttgctccagaagtactttaatttttagaaacaaactagtcccctggatttacctccagggtgcccttatgggcgtaagaaaaatcaaggagaaacctaatgtttgtaaaaaaggcgacaaagttcgcgtaatcgctggtaaagataagggaacagaagctgttgtccttactgcccttccaaaagtaaacaaagttatcgttgaaggtgttaacatcgttaagaaacaccaacgtccaactaacgaacttcctcaaggtggtatcatcgagaaagaagcagctatccacgtatcaaacgttcaagttttggacaaaaatggtgtagctggtcgtgttggttacaaatttgtagacggtaaaaaagttcgctacaacaaaaaatcaggcgaagtgcttgattaatcacgaaggaaaggagaagtataatggcaaatcgtttaaaagaaaaatatcttaatgaagtagttcctgctttgacagaacaattcaactactcatcagtgatggctgtgcctaaagtagataagatcgttttgaacatgggtgttggtgaagctgtatcaaacgctaaaagccttgaaaaagctgctgaagaattggcacttatctcaggtcaaaaaccacttatcactaaagctaaaaaatcaatcgccggcttccgtcttcgtgaaggtgttgcgatcggtgcaaaagttacccttcgtggtgaacgtatgtacgaattcttggataaattggtttcagtttcacttccacgtgtacgtgacttccacggtgttccaacaaaatcatttgatggacgcggaaactacacacttggtgtgaaagaacaattgattttcccagaaatcaacttcgatgacgttgacaaaactcgtggtcttgacatcgttatcgtaacaactgctaacactgacgaagagtcacgtgcattgcttacaggccttggaatgccttttgcaaaataatataggaggtaaatctaatggctaaaaaatcaatgattgctaagaacaaacgtccagcgaagttctctactcaagcttatactcgttgtgaaaaatgtggtcgtccacattcagtttaccgcaaatttaaactttgccgtgtttgcttccgtgaattagcttacaaaggacaaatcccaggcgttaccaaagcatcttggtaatatcatgatacgaagagcgtaacaaccacagcaaaaataggaaatttggtgtaggagcgatgctccaaaacaaatttatcttttttgcacaggttgtagctcgtgttcaaataagagttttctcatttgaatgtatcaatactatctgagcctagctcaatcattaactagcaagtgcaacttgcaaactactagtaagaggagaaaaacaaaatggttatgactgacccaatcgcagacttcctaactcgtattcgtaatgctaaccaagctaaacacgaagtacttgaagtacctgcatcaaacatcaaaaaagggattgctgaaatccttaaacgcgaaggttttgtaaaaaacgttgaaatcatcgaagatgacaaacaaggcatcatccgtgtattccttaaatacggaccaaacggtgaaaaagttatcactaacttgaaacgtgtttctaaaccaggacttcgtgtctacaaaaaacgtgaagaccttccaaaagttcttaacggacttggaattgctatcctttcaacttctgaaggtttgcttactgataaagaagcacgccaaaagaatgttggtggagaagttatcgcttacgtttggtaaaatcaagatacaaagctcgtaaagaacaaagcaaaattagaaagttggagaagtttgtttacaaacaagccaacttatctattttgcacagttcttagagcgtgttcagttcagctcttgaactaaataagtatctgaaccccgtgaaaactggccgttctggcctgacaatttaacaggagaaaataaacatgtcacgtattggtaataaagttatcgtgttgcctgctggtgtagaaatcactaacaatgacaacgttgtaactgtaaaaggacctaaaggagaacttactcgtgagttctcaaaagatattgaaatccgtgtggaaggtactgaagtaactcttcaccgtccaaatgattcaaaagaaatgaaaactatccacggaactactcgtgcccttttgaacaacatggttgttggtgtatcagaaggattcaagaaagaacttgaaatgcgcggggttggttaccgtgcacaacttcaaggatctaaacttgttttggctgttggtaaatctcatccagacgaagttgaagctccagaaggaattacttttgaacttccaaacccaacaacaatcgttgttagcggaatttcaaaagaagtagttggtcaaacagctgcttacgtacgtagccttcgttcaccagaaccatataaaggtaaaggtatccgttacgttggtgaattcgttcgccgtaaagaaggtaaaacaggtaaataatgttgagtggttgagtctcaaccaccaacctattttccaactttgtgcatagcacacgatttaaaactaaagaggtgaaaactgtgatttcaaaaccagataaaaacaaactccgccaaaaacgccaccgtcgcgttcgcggaaaactctctggaactgctgatcgcccacgtttgaacgtattccgttctaatacaggcatctacgctcaagtgattgatgacgtagcgggtgtaacgctcgcaagtgcttcaactcttgacaaagaagtttcaaaaggaactaaaactgaacaagccgttgctgtcggtaaactcgttgcagaacgtgcaaacgctaaaggtatttcagaagtggtgttcgaccgcggtggatatctatatcacggacgtgtgaaagctttggctgatgcagctcgtgaaaacggattgaaattctaataggaggacactagaaaatggcatttaaagacaatgcagttgaattagaagaacgcgtagttgctgtcaaccgtgttacaaaagttgttaaaggtggacgtcgtcttcgtttcgcagctcttgttgttgttggtgaccacaacggtcgcgtaggatttggtactggtaaagctcaagaagttccagaagcaatccgtaaagcagtagatgatgctaagaaaaacttgatcgaagttcctatggttggaacaacaatcccacacgaagttctttcagaattcggtggagctaaagtattgttgaaacctgctgtagaaggttctggagttgccgctggtggtgcagttcgtgccgttgtggaattggcaggtgtggcagatattacatctaaatcacttggttctaacactccaatcaacattgttcgtgcaactgttgaaggtttgaaacaattgaaacgcgctgaagaagttgctgcccttcgtggtatttcagtttctgatttggcataagaaaggggataaaatggctcaaattaaaattactttgactaagtctccaatcggacgcattccatcacaacgtaaaactgttgtagcacttggacttggcaaattgaacagctctgttattaaagaagataacgctgctatccgtggtatgatcactgcagtatctcacttggtaacagttgaagaagtaaactaatgaatttttaggggatgtgcactataccatcccctaaaactagatatagtcatctatgatgacgtcgtataggcgagttgatgggggagacaaccttttctcccttatcggcgctagcattttacaaaagaggagaaaataaaaatgaaacttcatgaattgaaacctgcagaaggttctcgtaaagtacgtaaccgcgttggtcgtggtacttcatcaggtaacggtaaaacatctggtcgtggtcaaaaaggtcaaaaagctcgtagcggtggcggagttcgccttggttttgaaggtggacaaactccattgttccgtcgtcttccaaaacgtggattcactaacatcaacgctaaagaatacgcaattgtgaaccttgaccaattgaacgtctttgaagatggtgctgaagttactccagttgttcttatcgaagcaggaattgttaaagctgaaaaatcaggtattaaaattcttggtaacggtgagttgactaagaaattgactgtgaaagcagctaaattctctaaatcagctgaagaagctatcactgctaaaggtggttcagtagaagtcatctaagagaggtgacctatgttttttaaattattaagagaagctcttaaagtcaagcaggttcgatcaaaaattttacttcacaatttttatcgttttggtctttcgtatcggaactagcattacagttcctggtgtgaatgccaatagcttgaatgctttaagtggattatccttcttaaacatgttgagcttggtgtcagggaatgccatgaaaaacttctcagtttttgctcttggtgttagcccctacattacggcctctatcgttgtccaactcttgcaaatggatattttacccaaatttgtagagtggggtaaacaaggggaagtaggtcgaagaaaattaaatcaagctactcgttatattgctcttgttctagcctttgtgcaatcgatcgggattacagctggttttaatactttggctggagctcaattgttgaaaacagctcttactccacaagtctttatcatgattggtatcatcttaacagctggtagtatgattgtgacttggttgggagagcaaattacagataagggatacggaaatggtgtttctatgattatctttgccgggattgttgcctcaattccagagatgattcagggcatctatgtggactactttgtgaacgtcccaagtagccgtatcaactcatccatcattttcgtaatcattttgattattactgtattgttgatcatttattttacaacttatgttcaacaagcagaatacaaaattccaatccaatatactaaggttgcacaaggtgctccatctagctcttaccttcctttgaaggtaaaccctgctggagttatccctgttatctttgcaagttcgattactgcagcgcctgcggctattcttcagtttttgagtgctacaggtcatgattgggcttgggtaagaacagcacaagaaatgctggcaacaacttcaccaactggtattgccatgtatgctttattgattattctctttacattcttctatacgtttgtacagattaatcctgaaaaagcggcagaaaacttacaaaagagcggtgcttatatccatggagttcgtcctggtaaaggtacagaagaatatatgtctaaacttcttcgtcgtcttgcaactgttggttctctcttccttggtgtgatttctattttaccgatcgtagcaaaagatgttttcggactttcagaagcagttgcttttggaggaaccagtcttttgatcattatctctacaggtattgaaggaatcaaacaattggaaggctacctattgaaacgtaagtatgttggtttcatggacagaacagaataaaagtaattactgaatcagtaattactgagggagtggaggtttaactctaacattagtgagagtttggtctcccctcttctattttgtttttaaataggggtgaaaaaactttttgcttctatttaaaaataaaataaggagatcaaatcatgaatcttttgattatgggcttacctggtgcaggtaagggaactcaagcagcaaaaatcgtagaacaattccatgttgcacatatctcaacaggtgatatgttccgtgctgctatggcaaatcaaactgaaatgggtgttcttgctaagtcatacattgacaagggtgaattggttcctgacgaagttacaaatgggatcgtaaaagaacgtctttcacaagatgatattaaagaaacaggattcttgttggatggttacccacgtacaattgaacaagctcatgccttggacaaaacattggctgaacttggcattgaactagaaggtgttatcaacatcgaagtgaatccagacagcctcttggaacgtttgagtggccgtatcatccaccgcgtaactggagaaactttccacaaggtctttaacccaccagttgactataaagaagaagattactaccaacgtgaagatgataagcctgagacagtcaaacgtcgtttggatgtgaatattgctcaaggggaaccaatcattgctcactaccgtgccaaaggtttggttcatgacatcgaaggtaatcaagatatcaatgatgtcttctcagatatcgaaaaagtattgacaaatttgaaataaagcgtttttcacacttgcaaaaatccgctacaaatgttatactgagatagtctgacttataattgttgtctctgtgtctagaggcatcgaatcgaaatttatggaggtgcttttgcgtggcaaaagacgatgtgattgaagttgaaggcaaagtagttgatacaatgccgaatgcaatgtttacggttgaacttgaaaatggacatcagattttagcaacagtttctggtaaaattcgtaaaaactatattcgtattttagcgggagatcgtgttactgtcgaaatgagtccatatgacttgacacgtggacgtatcacttaccgctttaaataatcgaaaaacttggagggataagaaatgaaagtaagaccatcggtcaaaccaatttgcgaatactgtaaagttattcgtcgtaatggtcgtgttatggtaatttgcccagcaaatccaaaacacaaacaacgtcaaggataagatagaaaggagaaaacatggctcgtattgctggagttgacattccaaatgacaaacgcgtagtaatctcattgacttatgtttatggtatcggacttgcaacatctaagaaaattttggctgctgctggaatctcagaagatgttcgtgtacgtgatcttacatcagatcaagaagatgctatccgtcgtgaagtggatgcaatcaaagttgaaggtgaccttcgtcgtgaagtaaacttgaacatcaaacgtttgatggaaatcggttcataccgtggtatccgtcaccgtcgtggacttcctgtccgtggacaaaacactaaaaacaacgctcgcactcgtaaaggtaaagctgttgcgattgctggtaagaaaaaataatataggaggtaaaagtcttggctaaaccaacacgtaaacgtcgtgtgaaaaagaatatcgaatctggtattgctcatattcacgctacatttaataacactattgttatgattactgatgtgcatggtaatgcaattgcttggtcatcagctggtgctcttggtttcaaaggttctcgtaaatctacaccattcgctgctcaaatggcttctgaagctgctgctaaatctgcacaagaacacggtcttaaatcagttgaagttactgtaaaaggtccaggttctggtcgtgagtcagctattcgtgcgcttgctgccgctggtcttgaagtaacagcaattcgtgatgtgactccagtgccacacaatggtgctcgtcctccaaaacgtcgccgtgtataatcatcgcattacactgcttttcgtttaagagggagtaactaaatgatcgagtttgaaaaaccaaatataacaaaaattgatgaaaataaagattatggcaagtttgtaatcgaaccacttgaacgtggctacggtacaactcttggtaactctcttcgtcgtgtacttctagcttctctaccaggagcagctgtgacatctatcaatattgatggtgtgttacatgagtttgacacagttccaggtgttcgtgaagacgtgatgcaaatcattctgaacattaaaggaattgcagtgaaatcgtacgttgaagacgaaaaaatcatcgaactggatgttgaaggtcctgctgaggtaacagctggtgacattttgacagatagcgatattgaaattgtaaatccagatcattatctctttacaatcggtgaaggttcttccctaaaagcgactatgactgttaacagtggtcgtggatatgtacctgctgatgaaaataaaaaagataatgcaccagttggaacacttgctgtagattctatttatacaccagttacaaaagtcaactatcaagtggaacctgctcgtgtaggtagcaatgatggatttgacaaattaacccttgaaatcttgacaaatggaacaattattccagaagatgctttagggctttcagcacgtattttgacagaacatcttgatttgtttacaaatcttactgagattgctaagtcaactgaagtgatgaaagaagctgatactgaatctgacgaccgtattttggatcgtacgattgaggaactggacttgtctgtgcgttcatacaactgtttgaaacgtgccggtatcaatactgtgcatgatttgacagaaaaatctgaagcagagatgatgaaagtacgaaatcttggacgcaagagtttggaagaagtgaaactcaaactcattgatttgggtcttggattaaaagataaataaaggaggaataaatggcttaccgtaaactaggacgcactagctcacaacgtaaagcaatgcttcgcgatttgacaactgaccttttgatcaacgaatcaatcgtgacaactgaagctcgtgctaaagaaatccgtaaaactgttgaaaaaatgattactctaggtaaacgtggtgatttgcatgcacgtcgtcaagcagctgctttcgtacgtaatgaaatcgcatctgaaaactatgatgaagcaactgataagtacacttctactacagcacttcaaaaattgttctcagaaattgcacctcgttatgctgaacgtaacggtggatacactcgtatccttaaaactgaaccacgtcgtggtgatgcagcgccaatggcgatcatcgaattagtataaaatcatcaattttgttgagtgttatgatgatggagtcttgtgctcttagtctagctctggtctaccgctaggatttcggtcctagcgggaacactcatcataagttgggatagtagacgcttgtttacgaaattgtttttttcttaagaacaacttcgtaagcaggcgtttttgagtattttagttagaattatgctatactatttgaaaagaatcctgtttaatgttcaggtttcctattaaaagaagaattggagtttgcttatgaaagcgattataactgttgttggtaaagataaatctggaattgttgcaggtgtttctggtaaaatagcagaattgggtttgaatattgatgatatctctcaaactgtcttggatgaatatttcacgatgatggctgtcgtctctagtgatgaaaagcaagattttacacgtcttcgtaatgaatttgaagcttttgggcaaattttgaatgtgaaaatcaacattcagagtgcagcgattttcgaagctatgtataatatctaggaggttatcatggatattagacaagttactgaaaccatctccatgattgaggagcaaaacttcgatatcagaactattaccatggggatttccctattggactgtatcgatccggatatcaatcgtgctgcggagaaaatttatcaaaagattaggaccaaggcagctaatttagtggctgttggcgatgaaattgcggctgagttggggattccaatcgttaataagcgtgtatcggtgactcctatttctctgattggggcggcgacagatgcgacagactatgtggttctggcaaaagcacttgataaggctgcgaaagagattggtgtggactttattggtggtttttcagccttggtacaaaagggttatcaaaagggagatgagattcttatcaattctattcctcgtgctttggctgaaacggataaggtctgctcgtcagtcaatataggctcaaccaagtctggtatcaatatgacggctgtcgcagatatgggacgagttatcaaggaaacggcaactctatctgatatgggggcagctaagttggttgtattcgctaatgctgttgaggacaatccatttatggcgggtgccttccatggtgttggggaggcagatgttatcatcaatgtcggagtttctggtcctggtgtggtgaaacgtgccttggaaaaagttcgtggacagagctttgatgtagtagcagaaacagtcaagaaaactgcctttaaaatcactcgtatcggtcaattggttggtcaaatggccagtgagagactgggtgtggagtttggtattgtggacttgagtttggcaccaacacctgcagttggagactctgtggcacgtgtccttgaggaaatggggctagagacagttggtacgcatggaacgacggctgccttggctctcttgaacgaccaagttaagaagggcggagttatggcttgcaaccaagttggtggtttgtctggtgcctttatccctgtttcagaggatgaaggaatgattgctgcagtgcaaaatggctctcttaatttggaaaaactagaagctatgacggctatctgttccgttggtttggatatgattgccatcccagaagatactcctgctgaaaccattgcagctatgattgcggatgaggctgcaattggtgtcattaacatgaagacaacggctgttcgtatcattccaaaaggaaaagaaggagatatgattgagtttggtggcctattaggaactgcacctgttatgaaagtcaatggggcttcgtctgtcgatttcatttctcgtgggggacaaatcccagcaccaattcatagttttaaaaattaagaaaataggagaaattttaagttctatttaaggttggatgtgtatactataatcattaaataaagacctcctaatattatttgaaacagataacactgatttagtttgaatttgattttcatctaatatctttatttaatagaactcctaaactttttcataataatctcctgcaaaagtcacctgtctgggtggcttttgttttatcatccatgatataatagaagcaaacggaggacggaaaatggtaaaagtacgattgtatttggtacgtcatggcaagactatgtttaacacgattggtcgcgcgcaaggttggagcgatactcctttaacggctgaaggtgagcgagggattcaagaattaggaatcggtttgcgagaatctggtctacagtttgatcgcgcttattccagtgattctggccgcaccattcagacaatgggaattattcttgaagaacttggtttgcaggggaaaatcccttatcgcatggacaaacgtatcagagaatggtgttttggtagctttgacggagcttatgatggtgatcttttcatgggcattattcctcgtatctttaatgtggatcatgttcaccaattgtcttatgctgaactggctgaggggttggtagaggtcgatacagctggttgggctgaaggatgggaaaaactcagtggccgaatcaaggaaggttttgaagcgattgccaaagaaatggaagagcaaggtgggggcaatgccctagtcgtgagccacggaatgaccattggaaccattgtgtatctgattaatggcatgcatccgcatggtctcgataatggtagcgtgacgatacttgaatatgaggacggccagtttagcgtagaagttgtcggtgacagtagttaccgagaactaggacgtgagaagatggaggaagtctctatttaattagtctagacttgcttgcaatgaactaggaatctagtaggaatatcaaaataagaaaaaacagccgaagtaatcctttcggctgtttttgatggggaaaactaaagtgtaatgctattgcttttagagattttcataaacaagagcaaggaacctactgttagaacagtcaggatagttgataaggctgcggctacaccgtaattccctctgagaacctctgtataaatggctacagtcattgttcttgttttgacattgtagaggaggatagaagtagagagttctgaaatcattgtaacccaagataggatagctccagaaataataccagatagcatcattggagttgtaatcttggcaaaggtattgagacggctacttcctaagctttcagcagcttcttcaatacttggtgctatttgttgcaagctagcaacagatgagcgaatagtatacggtaatcttctgacagatagagacataatcaagatgaaagcagttcctgtaatcataagaaatccacttccaaatagaccggtattgaaggaagaaatgaaggcaatccctagaacggttcctggtacaatataagggaccatactgaggctgtcaattaagtttgtaaacaaattccgttttctaacggctaggtaggagataaatgttgcgaataggacaactagaactaaggcaatcaaagggatacgaatggtattgaaaatagcagatcccatacgattgaaagccaccttgtaactgtttagagaataacctttgacaaataccatacctgatgtttttaggaaagaagtataaatcaagtagacttgaggtagaacagagaacaagataattccgtagactgttgcataaatggcagccatttttccttttgtagtttttttaggctcaattggatggagcgaattcatgctgaaactgtagcggtttgagatgtatttttggataaggaaaatcgccaaggcaatgataatcgccataattgctaaagcagatgcaaaagcagaatttcctccaacctcgctaatgaattgggtataaatcaagacggggaaagtccgatatccttcaccaatcaacataggcgttccaaagtctgagaatgctctcataaatacaagcagggcagctgctagtaaggttggaactaggagaggtaaaacaaccgttacgatacgcttaaatccgaaggaccccatgctttcagcggcttcaagtagagaattgtcaatacttttcattgtaccagcaacgtatagaaataccagtgggaatagttgcagtgtaaagacaagtacaattcctttgaatccataaatatcgatagctggaagatgaagagaatttgtcaggaatttagtaattaccccatttcgtcccagcaagagaatccaggagtaggctcccacgaaaggagctgacatagaagcaatgataatcaatatttgtagaaatttctttcccttgaagtcatacatagagaagagataagctaatagggttcctacgactaaggaagtgacagtagcggtaatggagaccttgaaactgttgacaagtgtctcagagtagtaagctttactaaagaaagtgacaaaattagctagtgagaattgtccttcatgtatgagtgcttgcttgagcacggtaacgataggataaacgagaaagacaagataagtaagaaagatgaagaaagaggaggctgtccaaatatttagttttttacgttccatggttgactccttttatcaggttttgtgaaccatttgcagaaaagacatttaatttttgagtattgattcgtagacgaatacgatcgcctttttgtagatcttcttcaaaagttgattcttcgctaacctgaatttttgaggcaaatcctgtttcgatgaagtattcagtattcagtccaagatagacgctatcgctaataattccttcaatatctccagattcatctttgataaactcttcaggacgaatacttacatgaatggcttgctcctcagcctgatcaagagctggcattcgaagagcatagccatctgaaaagacgatataagcgccgtcgctccgtttttcgagattggcagggataatatttgtgcgtccgataaaggttgctacaaactcattagctggtttatgatagagttcttttggtcgaccgatttgttggatgactccgtctttcataacagcaatttgatctgaaatagccatagcttcttcttggtcgtgggtcacataaacggttgtaattcccacttcgtgttggatttctcgaatggcttgacgcatatccaagcgaagtttggcatctagattactaagtggctcgtccatgaggagaacacttggattaaccgctaaggcacgtgccaaagcgacacgttgttgttgtccaccactgagtttatcgggctttcgatccgcatattgaacaatttgcatgagttcaagatatttattggtttgttgaatcaattcttcttttggaaccttcttttgcttgagaccaaaagcaacattatctcggacagtcaaatgtgggaaaatagcgtagttttggaaaaccatcccgatattgcgtttgctgggttccatattattgatttttttatcatcgaagtaaaattctccgccttcgatactgttgaaacctgcaatcatacgaagaagggtcgttttcccacaccctgaaggcccaagaagggtaaagagacttccttttggaattgtaatgttcaaattctcaataacagggacatcgtgatagattttttttgcgttaataattttgatctcactcatagtgaacctcttttactgtttagattggatatctgtaaagacttcgttgtattttttaacgatatctgatttattcttgatgacataatcataatcttcagtgagtgttttgattttgtcaattggtttcatattttcgctcgttttagcatttttacgaacaggacggttagtagtggttgtaccaagtgtatcttgtacttcttgagagataataaaatcgataaattttttggcattttccatatttttagcttttttaacgatagcagcactagcaggtaggaagactgttccttcttttggatagactaccttaatgttagctccgtcatttaagagtttaactgctggatcttcataagagagaccaacagccatttctccgtcagcgactgctttatagacaccagatgagcttgaaccgattttaccatcaataagtgtgaagagatcttttacataagaccaagctttatcgtctttgtaaccaccttgagcttgtagcatatttgttaattgagcaaaggcgctagaagagtttgctgggtcagcagttgcgatttttccttttagttcaggtttgagaaggtcgctatatccttcgatgttcatgcctttcgttaaatcaggattgacgattaaaacactaccatctagtgtataaggagtagagtagccagttgtgttttgatattctttgataacattatcattttcttttgaagtatagttttcaaagagttctccgtgggtagcatattgtgtataagaaccaccaaagataacatcggctacaggagcttctttttctgactctagttttttgaaaagttctccagtaccagcttgaatcagttctactttaataccgtatttttcttcaaaggcgggaatagttgctccaattaagccctctgagtttggtgaataaacgactagcgaaccgccgtctcctttatcagatgaactgtcatcggcagattcactagaagaacaagcggcaagaccaaaaagagctagtccgcaagcagcataatacatccatttctttttcatgatggatacctccgttatgttatttaagtttattttaaaataatgtaagcgtttttaaaaccgataattctattctattagagtaaaattctctacaaaaacggaagcaatctttttgattttatagtagggtgcgacagttaatcattgggaaatcaaattttattttttagatagaatatctgtgaaaatatcattgtactttttaagaatagtggatttatttttaatgacataatctgaatcttcggtggcaatcttgatttctgtcatagccttcatatttttattggttttagcatttttacgaatgggtctgattgttgtttcagttcctagcttatcttggatttcttgagaaaggaggaaatcgataaatttcttagcgttttccatgtgtttggcatttttgacgatagctgcgttaccaggtaaaaagacggttccttcttttggataaatgacttttacatcaaccccatcatttaagagttttaaagcaggatcttcataggtgagtccaacagccatttccccatcggcgacagctttgtaaacatttgaagaactagatgcaatctttccatctactagggtaaatagattttttacataggtccaagcttgttcattttcgtatccaccttggtctacaagcatgtttgttaattgagcaaaggcactagaagcattacttggatcagcagtagcaatttttccttttaatttaggattgagtagatcattgtagccttcaatttttatatcttttgtaagggctgaattggcaatgataacactgacatccagtgtgtaaggggtgtagaatccagttttattttgatattcagggattatctggtcgttttcttgagaaatataaggttcaaaaagtttttcgttagaagagaagagggcgtaggagcctccgaaaatgacatcggctactggggattctctttcggcctcagcttttttgaataattcaccagtgctggcttgtactaaatcaaccttaataccatatttttcttcgaaggaagggattgtttcttcgataaggtcttcagggttaggcgagtagacaaccaaagtgttatctgaatctttttcagcgctagtttctgcttctataggtgaagaacatcctgataaagaaaggaatatccatccacaagagagaaagaatagtatttttttcataagtatctccttttttacgaacaatttctctacctagattgttaatgtttttaaattgtagagttctacaggatataataaaaaccttaaagaaatctaaaacgggaaataggaaatgggttcctagagcaaggatgggtgaattgtagctgagattttgatggtaatactcttcaaaacacgtcgctttatctgcaatctcaaagctatgatttgagtagttagcactttgattttcattgggtaaaagcacaaaataaaaagattgcctgagctgagcaatccttttacatcaatggtttttatccatgagttttaattcttttggagaaatatggagatactttttaaaaacttttgcaaaatatttatagtctgaaaatccaatttgttcagagatatcgcttaggggggaattgggggattcagccattttatctatagcttgcttgaggcggtagcgtaagatatattcatttagcgtcattgggaagtcttctttgataaccttatatagataactttcgctataccctagattctctgcaatgctagaaatggtaaagtgcatacagtagtgttgatgaacaaattcaagaatttgctgaatgatttggttttgtgtatcaatttgttggatagaggtaagtaaagtttgatattcttctaaaaaaggagtttcttgacgagtgctaactcgtaatcgcaaaacaattttttgaagacattctgtcaactccttggtatcaattggtttggataagaaatcaactgccccatattgcatggcttttttggcattttgaaaatcgttataacctgataaaataactttttcataggagagagtacgagtggcttcgaacatcataaaagcatccataattggcattgtgatgtctgttaagacaatatgaggttctttttcttggatgagtttcattccctcttgaccgtgactggcagttcctactacttggatacctaaggcagagtagtctacggcaatctctagccattttcgaatgaggtgttcgtcttctacgataatgagcttaaacatgagttagtcctttcgttataaatttgacccaagtttctccttggcgattgactcctaaatctagctggacatcagaaaagaaattgctcaatcgtttatagctgttaacgatgccatgctgggtatgagggctttctaaagagtctaaaatagcgagtcgctcttgttttgtgagtcctccagcattatccttgactaaaaaagttagagaatctgcttccaaggtaatttggatatcaatatgaagatcaatacggtattgcatcccatattttatagcattttctactagaggaagcaagaaaagtttaggaataggttgattatcgatagtttctgggcagacaatatcataggaaaagtgctcgaaacgaatcttatgaataataaggtaatcctctataatctttaaatcttggcaaatggttgtttctttttctaaatcggtgatactgtagcgaagaatgcgcgtgagattttgaatcaggtcttgtgtgagagctgcatccattaaagaagtgattttaatcgtctcaagtgtattgtagagaaaatgaggattgaactgagcttccagcatttttctttcaaaaatccacttttctttttcgatggtcaacattttctgatgaagttgatctaattcatacaacatattattaatttttcggccataaattcaaactcatcacctgtttgtagagaaagtcttttttctgcttgtttgggaatttcttgaagttggtaaactaagctttcaataggaacagcgttgtgtgtagcaatcttatgagcaattcgtcttgcttgccagaagtagaggaagaatatacataaggtgagaatggaggctaggccgagtaagctaggaataggaaaaaaggattgaaaagtatagattgaaaaaatagcaccgactttttctttttgaacaataagcggttcattctcataccagtgggtacgagagtgtaggagtttttcatcaaatttttcaagagtggagcgagtgaactggtttgtattgttggaaaacatatttccaaagctatcggtaatgatgtatttagaatttatcattgggaaacttgagatgaaatcattctcatttacgaaagcaatcgtataggctataactcgttggttttgaagtagtggtttgataaagagtgtgtaatgttgcttatctgaagagagtgcaattttttctgtaactttttcttgagaaggattttgaatgagcagttttagatagtagggagataaaatactttcttgatgattgcgattggtactaaatagtaattcacctgtatcacttaggataatgaggtcagaactaagttttaatttagcttttgtctcgtaaaataagctaaagacttctctctctgtgtgtttgccatccaaaaatccaggaatcattttatagttcatagtggtcaggagctcattatttgcttctttcatctcttgaacttgtttgacaatctgtctcgtgtctttggagagttgttgcttttgtaaaaaataggaaaaaccaaaaagtaaaatgagtagtaaaagagaggtcataaaggctgcgatagagcttctatggagaatttctttttggagagattttttaaaggaatgagacatccgctacctccttggaagggttttttgttataagtatagcagtttaaaaattctagagcaaggtaaaatagaaaagtatagaatagaacgagaccaaattccctcaaaaatggtataatagtaacatcacaaaattggagagagaccatgagtttttataatcataaagaaattgagcctaagtggcagggctactgggcagaacatcatacatttaagacaggaacagatgcatcaaaacctaagttttatgcgcttgacatgtttccgtatccgtctggagctggattgcacgtaggacacccagaaggttataccgcaaccgatatcctcagccgttacaaacgtgcgcaaggctacaatgttcttcacccaatgggttgggatgcttttggtttgcctgcagagcaatacgctatggatactggaaatgacccagcagaatttacagctgagaacattgctaacttcaaacgtcaaatcaatgcgcttggattctcttacgactgggatcgtgaagtcaacaccacagatccaaactattacaagtggacgcaatggattttcactaagctttacgaaaaaggcttggcctatgaagcggaagtgccagtaaactgggttgaggaattgggaacagccattgccaacgaagaagtccttcctgacggaacgtctgagcgtggaggctatccagttgtccgtaaaccaatgcgccaatggatgctcaaaatcacggcctatgcggagcgtttgcttaatgacttagatgaacttgattggccagagtctatcaaggacatgcaacgcaactggattgggaaatcaacgggggctaatgtaacttttaaagttaagggaacagacaaggaattcaccgtctttaccactcgtcctgatactcttttcggtgcgactttcaccgttttggctcctgagcatgaactagtagatgccattacaagcacagagcaagcagaagcagtagcagactacaaacaccaagccagtctgaaatcagacttggctcgtacagaccttgccaaagaaaaaactggtgtctggacaggtgcttatgccatcaaccctgtcaatggtaaggaaattccaatctggattgccgactatgttcttgctagttacggaacaggtgccgttatggctgtgcctgcccacgatcaacgtgactgggaatttgccaaacaatttgatcttccaatcgtcgaagtacttgaaggtggaaatgtagcagaagctgcctacacagaagatggccttcatgtcaactcagactttctagatggactcaacaaagaagacgctattgctaagattgtggcttggttggaagaaaaaggatgtggacaagagaaggttacttaccgtctccgcgactggctctttagccgtcaacgttactggggtgaaccaattccaattattcattgggaagatgggacttcaacagcagttccagaaagtgaattgccacttgtcttgccagtaaccaaggacatccgtccttcaggtacaggggaaagtccactggctaacttgacagactggcttgaagtgactcgtgaagatggcgtcaaaggtcgtcgtgaaaccaatactatgccacagtgggctggttcaagctggtactacctccgctatatcgacccacacaatactgagaaattggctgatgaggatcttctcaaacaatggttgccagtagatatctatgtgggtggtgcagagcatgccgttcttcacttgctttacgctcgtttctggcataaattcctctatgacctcggtgttgttccgactaaggaaccattccaaaaactctttaaccaaggaatgattttgggaaccagctaccgtgaccaccgtggggctcttgtggcaaccgacaaggttgaaaaacgtgacggttctttcttccatgtggaaacaggagaggagttggagcaagcgccagccaagatgtctaaatcgctcaagaacgttgttaacccagatgatgttgtggaacaatacggtgccgatacccttcgtgtctatgaaatgtttatgggaccacttgatgcttcgattgcttggtctgaagaaggtctggaaggaagccgtaagttccttgaccgtgtttaccgtttgattacaagcaaggaaattgttgcagaaaacaatggctctctcgacaaggtttacaacgaaaccgttaaagctgtcacagagcaaatcgagtccctcaaattcaacacagccattgctcaacttatggtctttgtcaacgctgctaacaaggaagacaaactctatgtggactacgccaaaggctttatccaattgattgccccattttcacctcacttggcagaagaactctggcaaacagttgcggcaacaggtgagtcaatctcttacgtggcttggccaacatgggacgaaagcaaattggttgaagacgaaatcgaaatcgttgtccaaatcaaaggaaaagttcgtgccaaactcatggtcgctaaagacctatcacgcgaagaattgcaagaaattgctctagcggatgaaaaagtcaaagcagaaattgacggtaaggacatcgtgaaagtaattgcggtacctaacaaactcgttaatatcgtcgttaaataacgagtttattagctctatctgccaccttcaatagtccactggactattgaagccaaccaaattggttaatattgttgtgaaataagataggaatccttcagagtagaatctggaggattttttgagtcttcttatgaaagtatgatatactatgggcaactataaagtttggaaagcaaaacaaggggaaagttatgccagtaaatgaatatggtcaaatgattggtgagtcaatggaaggttatacaccaggtgaactgccttctattgatttcttagaagggcgatatgctcgaatagaagctctttcagtggaaaagcatacggaggatttattagctgtttatggtccggatactcctcgggagatgtggacctacctttttcaggaaccagtggcagatatggaggagctggttacccttttaaatcagatgttagctcgtaaggaccgtttttactatgcaatcatagacaaggaaactggtaaagttttaggaactttttctctcatgcgtattgaccagaataaccgagtaatagaagtgggagctgtcactttttctccagagctcagggggacacgaatagggacagaagcccagtatctcctggcgcgctatgttttcgaggaacttaactatcgtcgctatgagtggaaatgcgatgctcttaacctgccatcaagacgagcagcggaacgtttgggctttatttatgaaggaaccttccgtcaggcagtggtttataaggggcgcacgagggatacggattggttgtctataattgataaggattggcccaaagtaaaatctcgtttggaaacatggttgcgtcctgaaaattttgacaaaaatggacagcagtacaagagcttgagagaactctaagaggtgttgagatgattactattaaaaagcaagaaattgtcaagctagaggatgttttgcatctctatcaggctgtcggttggacaaattatacccatcaaccagagatgctggagcaggccttgtctcattcattagtaatttatctggcacttgatggtgatgctgtggtgggcttgattcgtttggttggcgatggattctcatcagtttttgtacaggatttgattgttttgcctagctatcagcgccaagggattggtagctccttgatgaaagaggctttagaggattacaaagatgcctatcaagtccagctggtgacagaccagacagaaagaaccttgggcttctatcgttctatgggctttgaaatcttatccacctataattgtatagggatgacttggatgaatcgagaaaaataacaaaacttatttttcttaagcaaagtttaaggctggtctagtattatatagtcattaaataaagacctcctaactttatttaatgaaatcctaaaaacttttttcatcataatctcctaatgaagtcacccaatcaggtggctttttttcttggataggtgatggtgatagaaattttttgcaaaatagcaaaatttgagaaaagttaagctatttttaagcttcgtcttgtatcatatagttattaagtaaagacctcctaactttatttaataaaatcctaaacttttctttttcataataatctcccttgactccacccaatcaggtggagttttttggctctatttcaggcttttggagactattctaaaaatcatttttcgatatttttcggattttggtcggggatttttttagagaatatgagtaagaaataggtctgttgttatttaagtgaattcaaccttaatttgattgtaggtgactgttaattgaaggaatggaactattgtaatgatgattttacttgtccagtagtggcgtattaaatgaggagtgatatgtaagcttgtctcttcgtttacgaaatcaaaatttttatgaaattgatagaatccctaactttctcttaatcttgaccgttttgttgtacagcggttaaagcttgaaaagccgagaatgtaaacctttgacaaaatttgtgaactgtaggataatggagaggaattaaggattagttctatattatggactagaaaagaccccaagctaacttccacattaagcttagggtcttttttgacactatctatcttcgtttagccatttatcgactaagcgaaggatgacaccgaccacaatcggtccgatgatagttttaaggattagttccatcatgagctatctcacctcctttcgtaggcggtgtagtagtgccgtataatattattccacataagtgttaaactcgggagtcacccaatcgggtggcttttttgtttgtggcttggttttttgatataatagagcaatgagtagaattttagataatgagataatgggggacgaggagttagtagaacgcacgctccgtcctcagtacttacgtgaatatattgggcaggacaaggtcaaggaccagctccaaatctttatcgaagctgccaaaatgcgggatgaagcgctggatcatgtgctcttatttggccctccaggcttgggaaaaacgaccatggcttttgttattgccaacgaactaggtgtcaatctcaagcagacttcgggtccagtcattgaaaaagccggagatctggtagcgattttgaatgacttagagcctggggatgtcctttttattgatgagattcatcgcttgcccatgtcggtggaagaggtgctttatagtgccatggaagacttctacattgacatcatgattggggctggtgaaggcagtcgcagtgttcatttggagttgccacctttcactttgattggtgcgacgactcgggctggtatgctctcaaatccgttacgggcacgttttgggattacaggtcatatggagtattatgcccatgctgacttgacggaaattgtcgagcggacggcagatatttttgagatggaaatcacccatgaggcagcatctgagttggcattgcgtagtcgtgggacccctcgtattgccaatcgtctcctcaagcgcgtgcgcgattttgcccagataatggggaatggggttatcgatgatcttattaccgataaggctttgactatgctggatgttgaccatgaaggtttggactatgtggatcaaaaaatccttcgcaccatgattgagatgtacggtggtggtcctgttggtctaggaactctttctgttaacatagcagaagaacgtgagacagttgaagatatgtatgagccttacttgattcaaaaaggttttatcatgcggacgcggtctggacgggtggcgactgctaaggcatatgagcacttaggttatgaatatagtgaaaaatgagcaagaaattctagaggattttagagaaaatccggatatgatggctattctgactgtcatccgaaacttggagttgacagattcctggttggcagcaggttctgtcagaaattttatctggaatctcttgtcagacaaatccccttttgactgtgaaacagatgtagatgtaattttctttgatccagatatttcttacgaggaaaccttgtccctagagaaaaaactgcgagaggactttcctcagtaccagtgggagttgaaaaatcaggtctatatgcaccagcacagtcctcacacttctccctataccagttctcgtgatgctatgagtaagtatccagaacgatgtacggctgttggactgcgcttgaatgaagaatccgattttgaactctatgcaccttatggtttggaggatattttgaattttcaagttcgtccaactcctcattttttagagaatcaagacagaatggaactttatcgaacacgtctatccaagaaaaattggcaggagaaatggaaaaatttgatttttaaaaatacttaaggaaactttaagctaggaagtgtatactaagtccataagttaagaagaccttaacttaaactcctaaaactttttcataataatctccctataaaaaatagagtcgcccaatcaggcggcttatttttttgaaaaatgggcttggtgcctgagaataatactcaatgaaaatcaaagaccaaactaggaagctagccgcaggttgctcaaaacactgttttgaggctgcagatagagctgacgtggtttgaatttgattttcgaagagtataaatagcttagtgatagaagaaaatagggaaatatggtataatgaaacgatagatttttgaataggaataagatcatgtttggattttttaagaaagataaggctgtggaagtagaggttccgacacaggttcctgctcatatcggcatcatcatggatgggaatggtcgttgggctaagaaacgtatgcaaccgcgagtattcggacataaggcgggcatggaagcattgcaaactgtgaccaaggcagccaacaaactaggcgtcaaggtgattacagtctatgctttttctacagaaaactggacccgtccagatcaggaagtcaagtttatcatgaacttgccagtagagttttatgataattatgtcccggaattgcatgcgaataatgttaagattcaaatgattggggagacagaacgcctgcctaagcaaacttttgaagctctgaccaaggctgaggaattaactaagaacaacacaggattaattcttaattttgccctcaactatggtggacgtgctgagattacacaggctcttaagttgatttctcaggatgttttagatgccaaaatcaacccaggtgacatcacagaggaattgattggtaattatctttttacccagcatttacctaaggagttacgagacccagacttgattatccgtactagtggagaattgcgtttgagcaatttccttccatggcagggagcctacagtgagctctattttacggacaccttgtggcctgattttgacgaggcggccttgcaggaagccattcttgcctacaatcgtcgtcatcgccgatttggaggagtttaggaggaaatatgacacaggatttacagaaaagaaccttgtttgcagggattgccctggctattttcctaccaattttaatgattgggggcctcttgcttcagatagcaattggaatcatagccatgctagccatgcatgaacttttgaagatgagaggtctagagaccatgactatggagggcctcttaaccctctttgcaacctttgctttgaccattcccttggagaattatctgacttttttaccagttgatgggaatgtggttgcctatagtgttttgatttcaattatgttaggaacgactgtttttagcaagtcttatacgattgaggacgctgttttccctcttgctatgagtttctatgttggctttggatttaatgctttactagatgctcgcgttgcaggtttagataaggctctattggccttgtgtatcgtctgggcgacagacagtggtgcctatcttgttgggatgaactatggtaaacgcaaattagctccgacagtttctccaaataaaacctttgagggtgccttgggtggtattttaggtgcgattttagtaactattatctttatgatagttgacagtacagttgctcttccgtatggaatttacaagatgtcagtctttgctattttctttagcattgctggacaatttggtgatttactagaaagttcgattaagcgtcactttggtgtcaaggattctgggaaatttattcctggacatggtggtgttttggatcgttttgatagtatgttgcttgtatttccaatcatgcacttgtttggactcttttaatcaaaagacggaggaaatactatgctcggaattttaacctttattctggtttttgggattattgtagtggtgcacgagttcggacacttctactttgccaagaaatcagggattctagtgcgtgaatttgccattggcatgggacccaagatctttgctcatattggcaaggatggaacggcctataccattcgaatcttgcctctgggtggctatgttcgcatggccggttggggtgatgatacaactgaaattaagacaggaactcctgtcagtttgacccttactgatgatggtaaggttaaacgcatcaatctttcaggtaaaaaattagatcaaacagccctccctatgcaggtgacccagtttgattttgaagacaagctctttatcaagggcttggttctggaagaagaaaaaacatttgcagtagatcacgatgcaacggttgtggaagcagatggaactgaggttcgaattgctcctttggatgtgcaatatcaaaatgcgactatctgggggaaactgattactaactttgcaggtcctatgaacaactttatcttaggtgtcgttgttttctggattttaatctttatgcagggtggtgtcagagatgtcgataccaaccagttccatattatgcctcaaggggctttggctaaggtaggagtaccagaaacggcacagattaccaagattggttcacatgaggttagcaactgggaaagcttgattcaagctgtggaatcagaaaccaaagataagacggccccgaccttggatgtgactatttctgaaaaggggagtgacaaacaagtcactgttactccggaagaaagtcaaggccgttaccttctaggtgttcaaccggggattaagtcagattttgtatctatgtttgtaggtggttttacaactgctgttgactcggccctccgaattctatcagatctgaaaaatctgattttccaaccggatttgaacaaactaggtggacctgttgccatctttaaggcaagtagtgatgctgctaaaaatggaattgagaatgtcttgtacttcttggcaattatttccatcaatattgggatttttaatcttattccgattccagccctggatggtggtaagattgtgctcaatatcctagaagctatccgccgcaaaccattgaaacaagaaattgaaacctatgtcaccttggccggagtggtcatcatggttgtcttgatgattgctgtgacctggaatgacatcatgcgactcttttttagataatcgaggaatattatgaaacaaagtaaaatgcctatcccaacgcttcgcgaaatgccaagcgatgctcaagttatcagccatgctcttatgttgcgagctggttatgttcgccaagtttcagcaggcgtttattcttacctaccacttgctaaccgtgtgattgaaaaagctaaaaacatcatgcgccaagaatttgataagattggtgccgttgagatgttagctccagcccttctcagtgcagaattgtggcgcgaatcaggtcgttacgaaacttatggtgaggacctttacaaactaaaaaaccgtgaaaaatcagacttcattctaggtccaactcacgaagaaacctttacagctattgtccgtgattctgttaagtcttacaagcaattgccacttaatctttatcaaatccagcctaagtatcgtgatgaaaaacgcccacgtaatggacttcttcgtacacgtgagttcatcatgaaagatgcttacagtttccacgctaactatgatagcttggacagtgtttacgatgagtacaaggctgcttatgagcgtattttcactcgtagtggtttagatttcaaggctatcatcggtgacggtggagccatgggtggtaaggacagccaagaatttatggctattacacctgctcgtacagaccttgaccgatgggttgttttggacaagtcagttacctcatttgatgaaattcctgcagaagtgcaagaagaaatcaaggcagaattgcttaaatggatggtttctggtgaagataccattgcttactcaagtgagtctagctatgctgctaacttggaaatggcaacaaacgagtacaaaccaagcaaccgtgtcgttgctgaagaagaagtgactcgtgttgcaacaccagatgttaaaacaatcgatgaagttgccgccttcctcaacgttccagaagaacaaacgattaaaaccctcttctacatggcagacggtgagcttgttgccgcccttctagttggaaatgatcagcttaatgaagttaagttgaaaaaccacttgggagcagatttctttgacgttgctagcgaagaagaagtggcaaatgttgttcaagcaggatttggttcacttggcccagttggtttgccagagaatgttaaaatcattgcagatcgtaaagtgcaagatgttcgtaatgcagttgtgggtgctaacgaagatggctaccacttgactggtgtgaacccaggtcgtgattttactgcagaatatgtggatatccgtgaagttcgtgagggtgaaatttcaccagacggacaaggtgtccttaactttgcgcgtggtattgaaattggtcacatcttcaaacttggcactcgctattcagcaagcatgggagcagatgttttggatgaaaatggccgtgctgtgccaattatcatgggatgttacggtatcggtgtcagccgtctcctttcagcagtgatggagcaacacgctcgcctctttgttaacaaaacgccaaaaggtgaataccgttacgcttggggaatcaacttccctaaagaattggcaccatttgatgtgcacttgatcactgtcaatgtcaaggatgatgaagcgcaagccttgacagaaaagcttgaagcaagcttgatgggagctggttatgaagtcttgacagatgaccgtaacgaacgtgttggtgttaaattcagcgatagcgacttgattggattgccaatccgtattactgttggtaaaaaagcggccgatggtatcgtagaagttaagattaaagcgactggtgacactatcgaagttcatgcagataacttgcttgaaacgcttgaaattctcagcaagaaataaaaactataatcagaagaaaaacaaggaaaaaatgtaactagtttttaccttgttttttctgtataatgggaaaaatgagtagataaagaggtaaatgtatgctaagatttccaaaggattttgtctggggatcctctacttctggaccacaaacagaaggacgtgtagcttgtgacggtaagggagataatctctgggattattggtaccaagtggagccaaatcgttactataatgggattggtccagataaaacatcaaccttttatgaaaactgggaaaaggatattgacctcttgttagaaactggtcacacggcctttcggacttctattcagtggtcacggatttttccacaagggcgtggggaagtcaatcctcaaggtgtagacttttaccgtaaggtttttgaggctattaaggccaaagggattcgtcttttagtcaatctttatcattttgatttgccttttgcccttcaagaggatggtgatggttgggaaaataaggcgactgtttcagcctatgaagactatgctcgtttttgttttgagacttatggagatttagtggatcaatggattacctttaacgagccaatcgttccagtagaatttggctatttttacgatgcccattatccacataaggtggatgcagaggcagccgttaaagtagcttatcatacacaattggccagcagtcgggtggttaaggcttgtcatgaacttttgccagattccaagattgggattgtcttaaacttgacaccggcttatccacgtagccagcatcctgctgatgtcaaggcagctcgcattgcggacctttttcaggcccaatctttcttagatccgtctgttttggggacttatccacaggagttggtagaaatcttgcatgaacacggtctcttacctgatgctacagaggaggagttggaactcattcgtgacaatacggtagacttccttggtgtcaactactatcaacctttgcgtgtcatggctcctcgatttgctaagcatccagagagtccactcttaccagaacatttttacgaggcttatgtgatgcctggacgtaaaattaatcctcatcgtggctgggagatttatgagcaagggatttatgacatcgcccaaaagatcaaggaaaattatggtaatatcgagtggatgttgactgagaatggtatgggtgttgaaggggaagaaaaattccgtcaagatggaatgattcaagatgattaccgtattgactttgtaaaaggtcatcttcgtgaactgcaccgtgccattgaagacggagccaattgtaagggctacttgatttggacctttattgattgctggtcatggctcaacagctataaaaatcgctatggtttggtcgaattagacttggaaactcaagaacgtcgtctgaagaaatcagggcactggttcaaggaattaagcgataataatggattttaaaaaaggactctgtctgattatcctaattggtcagagttttttggttataaaaagttaatttgaactataccaatttttactcttgacaagtgaaagaaacaagtatatactgtttttgctgattctataaaagaggaattagactataccaattttaaggagaaagcacagcttgtctgtgtcgtatatactatgtgtggaattgttggtgttgttggaaacacaaatgcaactgatattttgattcaagggcttgaaaagctcgaataccgtggctatgattctgcgggaatttttgttctaggtggtgctgaaaaccatctagtcaaggctgttggtcgtatagcagaattgtctgccaagacagctggtgttgagggaacaactggtatcggacatactcgttgggcaactcatgggaaaccaacggaagataatgctcacccacaccgctctgagacagaacgttttgttttggtgcacaatggggtgattgagaactaccttgaaatcaaggaagaataccttgcaggtcaccacttcaaagggcaaacagatacggaaatagccgttcacttgattggaaaatttgcggaagaagaaggtctctcagttcttgaagctttcaaaaaagctcttcatatcatacgtggttcttatgcttttgccttggttgactcacaagatcctgaagtcatctacgtagctaaaaataaatcaccacttttgattggtcttggagaaggctataacatggtctgctcagatgctatggctatgattcgtgagaccaaccaatacatggaaattcatgaccaagagttggtaatcgtcaaggctgatagtgtggaagttcaagattatgatggcaacagtcgtgaacgtgctagctatactgcggaacttgacttgtctgatatcggtaagggaacttatccttactacatgcttaaggaaatcgatgagcaaccaacggttatgcgtaaactcatccaagcctacacagatgaggctggtcaagttgtcgtagacccagctatcatccaggctgttcaagacgcagaccgtatctacatccttgcagctgggacatcttaccacgcaggatttgcttctaagaaaatgttggaagaattgacagatacaccagttgaacttggaatctcatctgagtggggctacggtatgccacttctcagcaagaaaccactcttcatctttatcagccaatctggtgaaacagcggatagtcgtcaggttttggttaaggctaatgaaatgggaatcccaagcttgacagtgacaaatgtcccaggttcaactctttcacgtgaagctaacaataccatgcttcttcatgcaggtcctgaaattgccgtggcatcaactaaggcttatacagcgcaaatcgcagcccttgccttccttgcaaaagcagtcggagaagcaaatggcaatgccaaagcgcaagcctttgacttggttcatgagttgtcaatcgtagctcagtctatcgaatcaactctttcagagaaagaaaccattgaagccaaggttcgtgagcttcttgaaacaactcgcaatgctttttatattgggcgtggtcaagattactacgtagccatggaagcaagtctcaaactcaaagaaatttcttacatccagtgtgaaggctttgcggcaggagagctcaagcacggaactattgccttgattgaagagggaacgcctgtcttggctctcttgtcagatccagtcctcgctaaccacactcgtggaaatatccaagaggtggcagctcgtggtgccaaagtcctcactatcgcagaagaaaatgttgctaaagagacagatgatattgtccttacgactgtacacccttacctctcaccaatttcaatggtcgtgccaacgcaattagtcgcttactttgcaacactccaccgtgggcttgatgtggacaaaccacgtaaccttgctaagtcagtaacggtagaataagcttaaaaagtctagttatctaggctttttcttgtgagcaaatcggttgcttgtactcaagattcgagttagaataatttttcaaaatgaaggaccggaatagacaaggagaatcactgtggtagaattgggaatttcaacatttggggaaacaacggagcttgaagggactgggaaaacttacagtcatgccgaacgcattcgtcagttggtggcagagattgagctggctgacaaggttggtttggatgtgtatgggattggtgagcaccatcgagcggattttgcgatatctgctccagagattgttctggcagctggggcagtcaataccaagaaaatccgtttgaccagtgcagtcagcattctctcaagtatggatccgattcgcttgttccaacagtatgccactattgatgctttgtctaatggacgtgcggagattatggccggaaggggttctttcacggaatcttttcccttgtttggatatgatttgaaagactacgaagccctttttgatgagaaattagacttgctccagttagttaatgaaaagaccaagttagactggcaaggtcgcttgacccaaacaatctctggcagagaagtttatcctcgtccagttcaggacaaattgcccttgtggatagcgacaggtggtcatgtcgaatcaacagtgaagattgctcaggcaggcctaccgattgtctatgccattattggtggcaatcctagttattttaaaaagttgattcaggcttatcgtgagattgggagcgaagcgggtcatgccagtcatgaactaaaggttggagcccattcttggagctggattgctgaagatggcgagcaggcggtgaaagattattttcatccgaccaagcaagtggtggatgctatttccaaagaccgtccacactggcagggattgcgttatgagcaatatttggagcaagttgggccaaatggtgctatgtttgtgggcaatccagatcaggtagcagaaaaattgattcgcatgattgaagacttaggtttggaccgctttatgttgcacttacctcttggttctatgcctcatgatcaagttctaagagctattaaacttttcggaacgcaagtggctccaaaagttcgagcttactttgccatgaaagaggcttaataaaaactactcaaatttattatgacgataaatattgtacaaaaatcaatcccccgagcgtcaaggcttgggggatttttctataggagggctagtttagttctcttttttgttttttagtaagaacccgagacctagaagggcaagaatgctgattcctgcaaacaggagtttgtgatcgtttttggttcctgtatttggaagttcagcttgtttagctaggggtgcagctatattttccttgctagagttatctaccgattcgttttgaacagcttcacttacagatgatgcttgtgcttcttgtgctggttgttcagcttgtgaatcagctgtagcttggctaggtttattttctgcatcagctacttttgcatctggttttgcagaatcaggtttagtttgtggagctggagtttgctgttccggtttgactactcggtttgacatattgtcttggatattatattgcccttgttcttgttttaagctagaaaggtcaaattctggtttttcttccacagctggggcaacgatggcaccgccttgagagattctaagaacagtagctgtaagggcatttaatttcaagcctttttcagtccattcgagtcctttcgggttggcaattcctactggccctgcttggttttcatctgctaaaacttcagcatttctgaggtgggcaaaggcagttcccaaattaaattcgcgagctttttcgtccgcattgacaaagactgcgtagatgtctccatttggagcagtgatttggtagccaattactacgtcctcttttgccacaccattttggcctgggacagtgatgaggtggacacggtctttgatatcttggagactcttaagtcggaaggcatctgtagattgacgaagagcaatcaaccctttcatatagtcacggctcttgacattttcaggatatgcttttccatctgtagccttagtccagtcaaacttgttaatagcatcactcgaatcgtaagagtcatggatgaagtaaggatagtcaaatggattgccgtccttatcacgcaacaagtgagatttgtttggaaccttatcctccgatactggagtcttgtaggctgggtcacggaattgtttagtacgtccgtattcctgaccagagtggataaacggagttccttgagatgtcaagaccatgaggtttccaagtcgcaaacgacggtggatttcagcatagttctcagccttgcttgggtcttttttgatagactgggcgatgatgtcaaagagggtcaagttatcatgggctgcgatgtattggatgacatctccagggctgtcagcttcaaagttggttggttgagcaatgatatttttgaagatggtgttgatatcacgcttgccacctgtgataaaggcaggttgaccttcgtttggataaccagacttgaggttgttacgaatgtcatctgaaaagacagcgactgtatcggtatgtttcatccaatcttggtcagcagctttagtaggcatgttctcatcacctgcataggttctccaaccttcaccaagcatgattaagtgtggattgagggcgcgtgcggccttgtacgcttcttcaatagaagctgcatcatggtctcccatcatatcgaagcggaatccatccactttgtaggtatcaactagatatttgatagagtcaactaggagtcgtttggtcatatggtgggttgtccccaagcgtccaccaccaaagctagtgcgaggtgtcccatcagcatccataaagtggtagtagtttggctctaaatcttcaaagatatcgaccttggctgtatggttatacactacatctaggatagctcccataccacgtttgtggatctcgttgatgaggtttttaaattctgcgattcgtttttctggatttttaggatcgcttgaatacataccagtcaaggagaagtagttttgaggatcatatccccagttatagttgctgttgcttgaagcatagtcagacaagcgttcatggtttttcaattcattgacaaagtagtaagacaagactggaaggagctggatgtgggttacacccaagtctttgagatagtctagtttttcaataaatgcttcaaaggtaccaaatggtttggttaagtcttttgcaatggcaggatctgaagtaaagtcacgcacatgagcttcgtagataacggcatcttcacgagtcttgaaattgtgaatcttaccataagtcaagtcttgaggtccgagtttggctggatctacaaaggcggctttagccactttatgggcatcgtcaatcttagcatcgtcactattccaagcagcgagggacttagcgtaaggatcgagtgcaagaacagttttaccttgacgttcgatttggtattgataatagtatccagtgaaatctgtgattccgagtttgtttgtgctatctagagtttgtttccaagttcctctttcccctttttcaagagcgacagttccaaccactttttcagggttattcttgtcgtagacaacgacagaaaccttgtcagcacttggtgaccaaagggttaaatcaacttgttttccttcttcttttaggtcagctccaagtttgccatcataactgtaagtctcatctttcagacgccagcttgttttggtagtgaattggtcagcgttgtagctcacggtataaggatgttttgtgtccgagaaatctccactgtaggtcactttcttaccagcttcatcgattgcaacatcggtgatagctactttatttcctaggtgattagtgatgttggagtgtttgaggatatcctcttttttagcaccgacaagtgttgaaaaactactctcaatgctagaagtgcctacgtgttgggctcctgtcatacggatatcatggacatagtatggatttgtgtaaatcgattcatcatcgtcttttaggaaaatttggctatgattttttaaatctgtgaacttataatcttctttacggattttcacatcgtctccttgtttgtttctgtctagtaataaaaatccaaggtctttagctgcatctttgagtggaatatcgatatagcgaccatatttgcctgtagccgtaaaatctgttccgttaggccattcaccactacttggatttttcacatctccccagtaccagagagatttcttgtcatagttgccatctgtacggtagtagttgacgcgaatagttcctgcaggttgtggctcgtaagagaaaaccttgtgttcttggtccaaccaagcctcattcatatttggtgccagtttttctatcgatttatcgccggttagatttttcccagctgtattattgatgaggaagctaattttcttggcttgttctccctttaatttgacatctaggtagtagccatagtcatcttttttggcatccttaaaggacaaggctccgttaggccagttttcagatggtttttcaacatcgtcccaagtccatagtccttgagcatccttgttttcttcaggaagctttttgacatggatacggaagtagttgtcttctattggttcttctgccttagtttcagtcgttactggactcgtagaagtagttggttcacttgaacgatcttgtccggtttgtggggctgaatcggcgggagttgcagcaggagtagttggctctgttgcaggtttttcttctgttttctttagggaagcgtttgcactatcgggtgaagaaaaatcgctttcgttcttgccagcgatgtttgttgcatcagtaagaggttgagtaagggaggtcgtatttctgttgctgggttcgttagtggttggtgtattttcgtttgctgagatagttggtgtagccatggcaagcagaataaggcttgctccaataaggacagaaccagttccatttttgagggaacggatgctgtagaccatttttttctcagtttgagatggtatttttctcataatgattctccaatcaataaatttctatcatcagtatagcacttagtaaaataagatgcaagcgttttcctaaaattaaaataaaagaaaaaatcgcaacaaattttgttacgattaagccagtatttcttataggaaaagattttgtcaaaaaattgttaatccccttgaaaaatctagctaaatagggtataatatgagtaatcatttgtcgtaggttttgtctgaaatattgtccagacaaggctcacagcagttaaatcttctgaaaaagtcagatttagctgctctttttgtgctttttttcaggatttttagtacttgtaacaaagacttaaagattctgaaaatttatcaagaggacacggtgataagggtttttaaaaccatatgacgattagaaaagcctgattgacaaggcttggaacttatttacaaaggagaatcatcttggcaggacatgacgttcaatacgggaaacatcgtacccgtcgtagtttttcaagaatcaaagaagttcttgacttaccaaatttgattgaaattcaaactgactcattcaaagatttcctagaccacggtctgaaggaagtatttgaagatgtattgccaatttcaaacttcacagacacaatggagttggaatttgttggatatgaaatcaaggaaccaaaatacacgctagaagaagctcgtatccacgatgctagctattcagcaccaatttttgtaaccttccgcttgatcaataaagaaacaggcgaaatcaagacccaagaagttttctttggtgatttcccaatcatgacagaaatgggtactttcatcatcaatggtggtgaacgtattatcgtttcgcagttggtccgctcaccaggtgtttactttaacgataaagttgataaaaacggtaaagtgggctacggttcaactgttatccctaaccgtggagcttggttggagcttgaaagcgactcaaaagacatcgcctacactcgtattgaccgtactcgtaagattccatttacaaccttggttcgtgcccttggtttctcaggagatgatgaaatctttgatatcttcggcgacagcgaattggttcgcaacactgttgaaaaagatatccacaagaatccaatggactctcgtacagacgaagccctgaaagaaatttacgaacgccttcgtccaggtgagcctaagactgctgaaagctcacgtagcttgcttgtggctcgtttctttgacccacgccgctatgacttggcagcagttggtcgttacaaaatcaataaaaaactcaatgtcaaaacacgcttgctcaaccaaaccattgcggaaccattggtagaccctgaaactggagaaattttggtagaagctggtacaatcatgactcgtagcgtgattgaaagcattgaaagccatttggatggcgacttgaacaagattgtttacattccaaatgatgcagcggttgtgactgagccagttgttcttcaaaaattcaaggttgttgctccaactgatccagaccgcgtcgtaactattattggtaatgccaatccagatgacaaggttcgtatcgtcactcctgcagatatccttgctgaaatgagctacttcctcaatttggctgaaggacttggtcgtgtagatgatatcgaccaccttggaaaccgtcgtatccgtgcggtaggtgaattgcttgctaaccaagtacgtcttggactttctcgtatggaacgtaatgtccgtgaacggatgtctgtccaggacaacgaagtcttgacaccacaacaaattatcaatatccgtcctgtaacagctgcggttaaagaattctttggttcatcacagttgtcacagttcatggaccaacacaacccactttctgagttgtctcacaaacgccgtttgtcagccttggggcctggtggtttgacacgtgaccgtgctggatatgaagtacgtgacgtgcactacactcactacggtcgtatgtgtccaatcgagacacctgaaggacctaacatcggtttgatcaataacttgtcatcttacggacacttgaacaaatatggttttgttcaaacaccataccgtaaagttgaccgtgaaacaggtgttgttacgaacgaaatcgtttggttgacagccgatgaagaagatgaatttactgtagcacaggctaattctcgtctgaatgaagatggaacatttgctgagaaagttgtcatgggacgtcaccaaggggtcaaccaagagtatccagcgaatgttgttgactacatggacgtatcaccaaaacaggtagttgccgttgcgacagcatgtattcctttcttggaaaacgatgactccaaccgtgccctcatgggagccaacatgcaacgtcaggctgtaccattgattaatcctaaagcaccttacgttggtactggtatggaataccaagcagcccacgattcaggagcggctgtgattgctcagtatgacggtaaagttacctatgcagatgctgacaaggtagaagttcgtcgtgaagatggttcattggacgtttaccacatccaaaaattccgtcgttcgaactcaggtactgcttataaccaacgcactctcgtaaaagttggtgatgccgttgagaaaggcgatttcatcgctgacggaccttctatggaaaatggagaaatggcgcttggacaaaacccaatcgttgcctacatgacttgggaaggttacaacttcgaggatgccgttatcatgagcgaacgcttggtgaaagacgatgtctacacatctgtccaccttgaagaatacgaatcagaaacacgcgatacaaagcttgggcctgaagaaattactcgtgaaattccaaacgttggggaagatgcccttaaagatcttgacgaaatgggtattatccgtatcggtgctgaggttaaagaaggggatatccttgtaggtaaagtaacacctaagggtgagaaagacctttcagctgaagaacggctcttgcacgctatcttcggagataaatctcgtgaagtacgtgacacttctcttcgtgtaccacacggagctgatggtgtggttcgtgatgttaagatctttacacgtgcaaatggagatgaattgcaatcaggtgtcaacatgctggttcgcgtctacatcgctcaaaaacgtaagatcaaggtcggagataagatggccggacgtcacggaaataaaggggttgtctctcgtatcgttcctgtagaagatatgccttaccttccagatggaactccagtcgatatcatgttgaacccacttggggtgccatcacgtatgaatatcggtcaggttatggaactccaccttgggatggcagctcgtactcttggtattcacatcgcaacaccagtctttgacggagcaagttctgaagatctttggtcaactgttaaagaagctggtatggatagcgatgccaaaacaatcctttacgatggacgtacaggtgaaccatttgataaccgtgtttctgtcggagtcatgtacatgatcaaactccaccacatggttgatgataaattgcacgcgcgttcagtcggaccttactcaaccgttactcaacaaccacttggaggtaaagctcagtttggtggacaacgtttcggtgagatggaggtttgggctcttgaagcctacggtgcatcaaatgtccttcaagaaatcttgacttacaagtctgacgatatcaacggacgtttgaaagcttatgaagctattacaaaaggaaaaccaattccaaaaccaggtgttccagaatccttccgagttcttgtcaaagaattgcaatctcttggtcttgacatgcgagtccttgacgaagatgatcaagaagtggaacttcgtgacttggatgaaggaatggacgaagatgtcatccacgtagatgaccttgaaaaagcccgcgaaaaagcagcacaagaggctaaagcagcctttgaagctgaagaagctgagaaagcaacaaaagcggaagcaacagaagaaactgctgaataagaataagcagttcacttagaatagaaagggaagaaatagtggttgatgtaaatcgttttaaaagtatgcaaatcaccctagcttctccaagcaaagtccgttcatggtcttatggagaagtcaaaaaacctgaaacaatcaattaccgtaccttgaaaccagaacgtgaaggactatttgatgaagttatctttggtcctacaaaagactgggaatgtgcttgtggtaagtacaaacgcattcgttacagaggaattgtttgtgaccgttgtggggttgaagtaacgcgtacaaaagttcgtcgtgagcgtatggggcacattgagttgaaagctcctgtatctcacatctggtacttcaaggggattccaagccgtatgggcttgacccttgatatgagccctcgtgccctcgaggaagttatctactttgcagcttatgtggtgattgatcctaaggatacaccacttgagcacaagtctatcatgacagagcgcgaataccgtgagcgcttgcgtgagtatggttatggatcattcgttgccaagatgggtgccgaagctatccaagaccttctaaaacaagtagatcttgaaaaagaaattgctgaactcaaagaagagttgaaaacagctactggacaaaaacgtgtcaaagctatccgtcgtttggatgttttggatgccttttacaagtctggaaacaaacctgaatggatgattctcaacatccttccggttattccaccagatcttcgtccaatgttgcagttggatggtggccgttttgcctcatctgacttgaatgacctttaccgccgtgttatcaaccgtaacaaccgtttggctcgtttgcttgagttgaatgcaccaggtattattgttcaaaatgagaagcgtatgcttcaagaagcggttgacgctttgattgacaatggtcgtcgtggtcgtccaatcacaggaccaggtagccgtccattgaaatcattgagccatatgcttaaaggtaaacaaggacgcttccgtcaaaacttgctcggtaaacgtgttgacttctcaggacgttccgttatcgccgttggtccaacgcttaagatgtaccaatgtggtgtgccacgtgaaatggcgattgagctctttaaaccattcgttatgcgagaaatcgttgcacgtgatatcgtgcaaaacgtcaaagcggctaaacgcttggtggaacgtggagacgagcgtatctgggatatccttgaagaagtaatcaaagaacacccagtacttcttaaccgcgcaccgacccttcaccgtttgggtatccaagccttcgagccagtcttgattgatggtaaggcccttcgcttgcacccacttgtctgtgaagcctacaatgccgactttgacggggaccaaatggccatccacgtaccgctttcagaagaagcccaagcagaagctcgtatcctcatgctcgctgctgagcacatcttgaacccgaaagatggtaaaccagttgttaccccatctcaggatatggttttgggtaactactacttgactatggaagaagctggccgtgaaggtgaaggaatggtcttcaaagaccgtgacgaagccgttatggcttaccgtaatggttatgttcacctccactcacgtgttggtatcgcaacagacagcctcaacaaaccatggacagaagagcaaagacacaaggtcttgcttacaacagttggtaaaatcctcttcaacgacatcatgccagagggtctaccatacttgcaagaaccaaacaatgccaacttgacagaaggcgttccagctaaatacttcttgccacttggtggagatatcaaggaagcaatcagcaaacttgaactcaaccctccattcaagaagaaaaaccttggaaatatcatcgctgaaatcttcaaacgtttccgtacaacagaaacttctgctctacttgaccgtatgaagaacctcggttaccaccactcaactcttgcaggattgacagttggtattgccgatatcccagtcgttgatgacaaggctgaaatcattgaagaatcacacaaacgtgtagaacaaatcacaaaacagttccgtcgtggtatgatcacagacgacgagcgttacaatgctgttacagctgaatggcgtgctgcccgtgagaaactagagaaacgtttgattgccaaccaagatcctaagaacccaatcgttatgatgatggactctggagcccgtggtaatatctcaaacttctcacagcttgccggtatgcgtggtctgatggctgctcctaacggacgtatcatggaattgccaatcctttcaaacttccgcgaaggtttgtcagtactcgaaatgttcttctcaactcacggtgcccgtaaaggtatgaccgatacggcccttaagacagctgactcaggttacttgactcgtcgtttggttgacgttgcccaagacgttatcatccgtgaggacgactgtggaacagaccgtggtctcttgatccgttctatcgcagaaggaaaagagatgatcgagtctcttgaagaacgtctcaatggtcgttacactaagaaaaccgttaaacatccagaaactggtgcagtgattatcggttcaaatgagttgattacagaagacaaggcgcgtgaaattgttaatgctggtgtggaagaagtgactatccgctctgtatttacatgtaacactcgtcatggtgtctgtcgtcactgttacggtatcaacttggcgactggtgatgcggttgaagttggtgaagcagttggtacaatcgctgcccaatctatcggggaacctggtacacagcttacaatgcgtaccttccacacgggtggggttgcctcaaataccgatatcactcagggtcttcctcgtgtccaagaaatctttgaagcccgcaatcctaaaggggaagcggttatcacagaggttaaaggacaagttactgctatcgaagaagatgcatcaactcgtactaagaaagtctttgttaagggtgaaactggcgaaggtgaatacgtcgttccatttacagctcgtatgcgtgttgaagttggagaccaagtagcgcgtggtgctgctcttacagaaggttctatccaaccaaaacgtctccttgcagttcgtgatgtcttgtcagttgaaacttaccttctcggtgaagtacaaaaagtttaccgtagccaaggggtagaaatcggtgacaaacatatcgaggtaatggttcgtcaaatgatccgtaaagtccgtgtcatggatccaggtgacacagatcttctcatgggtaccctcatggatatcaatgactttacagatgccaacaaagatgtccttattgcaggtggagttccagcgacaggtcgcccagttcttatgggaattaccaaagcctcacttgaaacaaatagtttcttgtcagcggcttccttccaggaaacaactcgtgtccttactgatgcggctatccgtggtaagaaagaccatctccttggacttaaggaaaatgttatcatcggtaagatcatcccagctggtactggtatggcccgttaccgtaaccttgaaccacatgctatcaacgaagaagaataccttaatcctccagtagaggaagaaggggatgaagaaataacagaagtagttgtggatactgccgttgaaactgtggaagaaacagtagaataaaagagaatgagagagccttcgggttctctttctcttttctgaaaactttctccatttttccatgaaatgtggtaaaataatactcaatgaaaatcaaagagcaaactaggaaactagccgtaggttgctcaaagcactgctttgaggttgtagatagaactgacgaagtcagctcaaaacactgttttgaggttgtggatagaactgacgaagtcagtaaccatacctacggtaaggcgacgttgacgtggtttgaagagattttcgaagagtataaaagaaagaagctgacaaaggagacaggtatggaacaaacattttttatcattaaaccagacggtgtaaaaagaggattagtgggtgaggtgttgaaacgcatcgaacaacgtggatttacaatcgaaaaattggagttgcgtacaaaggtttcagaagggttaattgatcagcactatcaggacttggttggtcaaagtttttacccaccgattcgtgaatttatgacttcaggaccggttcttgtaggtatcatttctggtcccaaagtaattgaaacttggcggactatgatgggtgcaactcgtccagaagaagctttaccaggaactattcgaggtgattttgcaaaagctgctggagaaaatgaggttatccaaaatgttgtgcatggttcagattcagaagagtcagctaagcgagaaattgctctttggtttgaagagaaatagtaaaagtttgatgtaagggatacttgcgtcaaacttttttgcattttagagtagaaaactgacagttgagaaatattctagcaatggtgaggctttctagcatataataagagcaagtatggaggaagaatgatggaaaaaatgaaaaagcaaattcgagttttgttattgctgacagtttttggtcttagcagctgttcttgtttaagtttatctacttgggccttgatgttaaatcaaaactgcttctattatttagttggcatgttgcttcttgccagtattggtgcagggctaaactattatagagggcagggaaatcaacattattcagtttttaaggaagataagcaacaattcttgtatagtctcttgctcttagtaaatattttgggtttagctttaattgtcatagaacatatccttgcaggaaatacatccgtagaaggatttgtggaagcctttctaccgagtttctttttcttatttgggattgatttgttagtttttctgccgattcagaagtatgtaaatggagtgaaaaagtttttgggaaagaaggaaatctgttttattagtggactagctattctaatctttctcagaaatccttggatgctattgtccatgaccttttatattgccttggggatgctatttctaggactgttggtgccaaaagtcattcgctgggaagtttcattttacagtcatttgatgagagatatcttgttagttgtcttcttactgtttctattttaagaacaaaaaaagagatagttctagttttacaatttataatatggaattcatagataatacctagacaaaggacaactttttggtataatagaaacatgtacactaaaaacgaagaagagttacagtccttaggtgaacgtttgggctatttattagaaaagaatgatgtcttaattttaactggtgaacttggagcaggcaaaacgacatttacaaaaggtcttgctaaaggattacatatttctcagatgattaagagtccaacctacactatcgtaagagagtatgaaggtcgtcttccactttaccacctagatgtttatcgtatagagggggatgctgattctattgatttagatgagtttctctttggtggtggggtaactgtcatcgagtgggggcatcttttaggtgatgccttgccagatacttatttagaattggaaattctaaaagaagaagagggtcgcagactgaattttcaagcaaaaggtttgcgtgcagaaaagcttttagaggagcttcaacatggagtatgagttgctcattagggaagcagaagttgaagatgcggctgaattagtatcatttttaaatcgtgtcagtgtagaaacagattttaccagtctggacaggaatggcattttgatgacagatactgagatggagttgtttttggataaacaggctcactctgaaaatcaaatcactttactggccttgctgaatgatgaaattgctggtcttgtgaatatcacagctgatcaacgcaagagagttcgtcatattggagatctctttattgtgattggtcagaagtattggaataatggactggggagtttgttacttgaagaagtcgtagaatgggcacaggctagtggcattcttcgtcgacttcaactaactgtccaaactcgcaatcagggtgcagttcatttatatcaacagcatggctttgtaattgaaggtagacaagagcgcggtgcgtacatagaagaagggaaatttatagatgtttacctgatgggtagactgatagattgatagaaatatggttaaaaaaattattggaatggtgctagcttttctagctgtgacagttttaggtgtgggtgtttttgcttatactatttatcagcaaggtacagaaaccttatcaaaaacctataaaaagattggggaagaaaccaatgttattgaggctactgaacccttaacgatccttttaatgggggttgatactggaaacgaagaacgaacggacccttgggagggaaatagtgattccatgattcttttgacagttaatccgcacacgaaaaagaccatgatgttgagtttggaacgtgatatcctgactaaaattcagcataaagatggtagtattgaagaagcgaaactgaatgccgcctatgcgggtggaggtgcagaattagctatctcaaccattcagaagatgatgaacatccatattgaccgctatattatggtcaatatgcacggattacaacaattagtcgatgcagtgggtggtataactgtcaataacacgctaggtttcccgatttctattagtgaccaagaggaatttaatactatttctattggtgttgggcaacaaactctaaatggagatgaagctcttgtttattctcgcatgcgctaccaggacccagaaggggactacggacgtcagaaacgtcagcgtgaagtcattcaaaaggttgttgaaaaagttcttagcttgaatagtgttagtcactatcaatctatcttaaaagccctaagtaccaatatgcagactaatattgatctatctgctaagagtatcccaagtttgttaggttacaaggactcgtttaaaacgattgaaacccaacaattacgaggagaagatgccgaattgcaagggacatcttaccaaatcgtaactgctaaccatttgttagagatccagaatcttttgagaacctcacttgataaaccgagggtgacagagttagagacaaatgcagtcttatatgaagatatttttggaaaccaaaatggtatcggtttgggaacaggtacgattaataatacaacaaatcaagaagatgtagaataatctattttatagttaaaatcgtgggaaatttcctacgattttttcaaaaaaatacgaatagatagttaggaggaaacatgaaagcagaaattattgctgttggaacagagattttgacaggacagattgtcaataccaatgctcagtttttgtcggaaaaactagcagagattggggtagatgtatattttcagacggctgtaggagacaatgaagctcgtctcttgtctttgctcgaaattgccagtcaacgtagtagtctagtgattttgacaggtggtttagggccaactgaggacgatttgaccaaacaaactctggctaaatttttagggaaagaattagtctttgatcctcaggcgcaggagaagttggatgtcttttttgcccagagaccagactatgcccgaacaccgaataacgaaagacaagctcaacttgtagaaggagcgattccactgccaaatgaaacaggactggctgtgggaggaatattggaagtcgatggagtgacctacgttgtccttccaggtccaccaagtgaattaaaacctatggttttaaaccaacttctacccaagttgatgacagggagcaagctgcattcccgagttcttcgtttctttgggattggcgagagccagttggttacgattttgtctgatttgattgataatcaaaccgatccgaccttggccccttatgctaagacaggagaagtcactctgcgtctgtcaacaaaagctagcagccaagaagaggcgaatcaagtgctggatatcttggaaaatcaaatcttaggtcgccagacctttgaaggcctttctttacgagatctttgttatggttatggggaagaaactagtttagctagcattgtggtagaagaactgaaaaggcaagggaaaaccatcacgtctgctgagagtttgacggctggtcttttccaagctagggtagcggatttttcgggtgcttcaagtatatttaagggtggttttgtaacctatagcttggaggaaaaatcaaagatgttggatattcctgtcaaggatttggaagaacagggtgtggtgtctgaatttacagcacagaagatggctgagcaggcacgaatcaagacccagtctgattttggccttagtttgactggtgtggcagggccagatagcctagaaggacatccagctgggacagtcttcataggcttggctcaagagcaaggaactgaggtcatcaaggtcaatattggaggcagaagtcgagcagatgtacgtcacattgcggttatgcatgcctttaacctagttcgcaaggctttattaagtgactaacttttgatataatagtagataggtctgaggaccattagaatgtaggagaatagaatggcgaaaaaaccaaaaaaattagatgaaatttcaaaaaaaattcggggcagaacgtgaaaaagccttgaatgacgctcttaaattgattgagaaagactttggtaagggttcaatcatgcgtttgggtgaacgtgcggagcaaaaggtgcaagtgatgagctcaggttctttggctcttgacattgcccttggttcaggtggttatcctaagggacgtatcattgaaatctatgggccagagtcatctggtaagacaacggttgcccttcatgcagttgcgcaagcacaaaaagaaggtggtattgctgcctttatcgatgcggaacatgcccttgatccagcttatgctgcggcccttggtgtcaacattgacgaattgctcttgtcacaaccagactcaggagagcaaggtcttgagattgcaggaaaattgattgactcaggagccgtggatcttgtcgtagtcgactcagttgcggcccttgtccctcgtgcggaaattgatggagatatcggtgatagccacgttggtttgcaggctcgtatgatgagccaggctatgcgtaaacttggtgcttctatcaataaaaccaaaacaattgccatctttatcaaccaattgcgtgaaaaagttggggtcatgtttggaaatccagaaacaactcctggtggacgtgctctgaaattctacgcatcagtccgtttggatgttcgtggaagcacacaaatcaagggaactggtgaccaaaaagataccaatgtcggtaaagaaactaaaatcaaggtcgtgaaaaacaaggtggctccaccatttaaggaagccttcgttgaaatcatgtacggagaaggtatttctaagactggtgaactcttgaaaatcgcaagcgatttggatatcatcaaaaaagcaggagcttggtactcttacaaggatgagaaaatcgggcaaggttctgaaaatgctaagaaatacttggcagataacccagaaatctttgatgaaattgaccatcaagtccgtgttcaatttggtttgattgatggagaagaaattgctgaaagcaaaaaagatgaagcagctcaagtagactctgtgaatgaagaagtaacccttgacctaggcgatgagcttgaaatcgaaattgaagaataagttgttaaagtagtggagcaaatccactgctttttcgatgccttattctggttttccgctcacgcatagtttgctgtttcttgtcgctcctctggaaagctgatataatagccttatgaataaaaaacgaacagtggacctgatacatggtccgattcttccttctctcttgagttttgccttcccaatcttgctatcaaatatttttcaacagctctataatactgctgatgtcttgattgttgggcgttttcttggtcaagaatccttggctgcagtaggagcgacgacagcaatttttgacctgattgtaggatttactcttggtgttggcaatggcatgggaattgtcattgcccgttattacggggctcggaattttataaaaattaaggaagcagtagcagccacctggattttaggtgctcttttgagtattgtagttatgctgctgggatttcttggtttgtatcctctcttgcaatacctagatactcctgcagaaattcttccccagtcctatcaatatatttctatgattgtgacctgtgtcggtgtcagctttgcctataatctctttgcaggtttgttgcggtccattggggacagtctggcagcgcttggatttctgattttctctgctctggttaatgtggttctggatctctatttcattacgcaattgcatctgggagttcaatctgcaggccttgctaccatcatttcgcaaggcttatcagcggttctctgcttttattatatccgtaagagtgtgccagaacttttgcctcaactcaagcatttcaaatggaacaaggctttgtacgctgatctcttggagcaaggtttagctatgggtttgatgagttcaattgtatcgatcggcagtgtgattttacagtcttctgttaatacctttggtgcagtgattattagtgcccagacggcagctcgacgcattatggctttcgcccttcttcccatgactgctatttctgcatcaatgacgacctttgcttctcagaatctaggagctaagcgaccagaccgcattgttcaaggacttcgaatcggcagtcgtctaagtatatcctgggcagtttttgtttgtatcttcctcttttttgccagtccaaccttggtttccttcttggctagttcgacaaatggttacttgatagaaaatggaagtctgtacttgcaaatcagttcagccttttatcctattttgagtctcttgttgatttatcgcaattgtttgcagggtttggggcaaaaaatccttcctctggtttctagctttatcgaactaatcgggaaaatcgcttttgtggttttgattatcccttgggcaggatataagggagttatcctttgcgaacccttaatctgggttgccatgaccattcaactgtatttctcactgtttcgtcaccccttgataaaagaaggcaaggaaattttagcaactaaagtgctatcctagttgtatttactgaataaaatccatttcctctagtgaaaatcgaaaaaacttgtgttataataagaaagattaaaatgtgaaaaaaggagattcctaatgggacgtaaatgggccaatatcgtagccaagaaaacggctaaagatggagctaactctaaagtatatgcaaaatttggtgtagaaatctatgtagcagctaaaaaaggtgatccagatccagaatcaaactcagccttgaaattcgttatcgaccgtgctaaacaagcccaagtgccaaaacacgttatcgataaagctttggacaaggctaaaggaaacacagacgaaacctttacagaaggacgttacgaaggttttggaccaaatggttctatgctgattgttgatactttgacttcaaatgtcaaccgtacagcggctaatgtccgtgcagcctttggtaaaaatggcggaaacatgggcgcttcaggttcagtttcatacctctttgacaacaagggagttatcgtatttgcaggtgaagatgcggacgcggtctttgagcaattgctagaagcagatgtggatgtggatgatgtagaagcagaagaagggacaatcacagtttacacagctccaactgaccttcataaggctatcgttgcccttcgtgagtcaggtatcgaagaattccaagtgactgaattggaaatgattcctcagtcagaagtggaattgtcaggcgatgatcttgaaacctttgaaaaactttacagcgttcttgaagacgacgaagacgtacaaaagatctacacaaacgtagatggattctaatagaaaaacgaacagttttactagctgttcgtttttttgatatttgaacttagaatctggtttcagaatcgttttgttgattgctttttctagacctagaccgactgatgtttttggacgagcaagagctctccattgtcctgttttgcaaaagttaaggtaacagtcttgatcttgtctccaatagagatataggtgatttttttcgtattgtaacccccaagagtgaagtcaaactcggaatctggctttccgtgtttgttgataatatcctcgtaggtggtaccaccttttcctttgttgtcaaggtcaccttcgattaaggcgtcgaactgttcttgggtccaggagaaggtatcgtctgtcaagccgcttttttcttcgcgttccattgaggcactcgtatccatgtaggaacggttaaactccttggcatactctttgtagacatcagcgtatagtacctgagtcgtaaagaaaagtacaacagaggcaactgccagggatgttccgataatagtcattgttttccgttttttgaggttgacgataaggccgataatccccaagataaatgcgacgatgccgatgaacaacgatggatagttaataaacgggatccaggatcctaaaagtgcgatggctccaaaaatagttgctaagattcctaaaactctttgttcttctggtttcatttgaaagttttctctcctcattaagtgaatggatttctacccacagtagtgagcgcttattatataaaaaatcttgcctaatgtcaatttaaactaagatagttctcatggaaactttttcttgacatctctttttaaagtggtaaaatagttctcatggaaacttatttagttcctaggagaactaaatgtgatagttagaaaggagttagtatggataaaccgatgttagtctttaagcgttttggtcatcagattcacctgatggtgcaaaaggaagccaaacgttgtggtattgaatttatgggtgggcctcaagggcaggttctgcattttttagatcattgtgaacaaaaagaggaactggtcctgattaaggatatcgagcaggaactcaatattaccaagtctgttgctagtaatttggtcaagcgtatggtgcaaaatggtttggtggaattggaggcgagtcctagcgataagcgggcaaaatttgttcgtttgacggacaaagcacgttctcagatgcaacaggttaagtctttttttgaacgaatagacaagaagttgatggaagacattgatgaagatgaattactgatttttgagaaagttctcggtcaactacaggaaaatatcaagagaataggaggagataatgaagaaattagctaaacgaattagtagaaaagaatgggggatgattttactagccattctctttacctgcttttcagtctacctagagttggaagttccgacctatatctcgaaaattacggatttgctgggaagtcaaggaaccaacttggatgagttatggcaaccagcaggtatgatggtcggaatgtctttttttgccttcttatccgcagtcgcagttggattttttgcatcccgagtggcggcttcttatactagtaggctgagaagtgatatttttaaccgagttttggattactcgcagacagagattaagagattctctattcccagtcttttaactcgtaccaccaatgacattactcaagttcagatgttgattaccatgggcttgcaagtagttacgcgtggtccgattatggctatctgggctatcgggaagattttaggtcattcagaatactggctctgggccgtacttgtggcagtgattgtcaacgttctgatgacgactgttttgatgacgctagcctttccaaaacagtccttgattcaggggctgactgataaactgaacagtatcactcgtgagagtttaacaggtattcgcgtcgttcgcgcctacaatgctgaagaataccaaaatgaaaaatttgcagcagcaaatgatgaattgacacgcttgaatttgtttgtcaaccgtcttatggctattttgaaccctatcatgatgggaatttcaagtggtttgagtgtggcgatttactggattggggcctatgtgattaacgacgctgctccgatagcacgtctgcctctctttagtgatatgattgttttcatgtcttatgccatgcaggttgtcatgggcttccttctcatgggagcactcttcatcgttcttccccgaactatagtctctgctaagcgcattaatcaagttttagatttgcattcttctatccaaaaccctgctcaagtgcagctggctgatgaaaacctcaaaggtcaggtcgaatttaaggatgtgaccttccgctatgcggcaaattcggaggcagttatcgagcatgttagctttagagcagaaactggtcaaacagtggcctttattgggtcaacaggttctggtaaatcaactctagtcaatctgattccacgtttctacgatgtgtcagaaggagaaattctggtggacggtgtcaatgttcaagactatgctctagaagatttgcgcaacaaagttggttatattcctcagaaagcggttctcttttcaggtgatgtcaagggcaatctagactttggacaaagtctagaaacaccgcttagtgagcaggctatgtggcaggctttggagttggcccagtctaagaactttatcgaagacaaggaagcgggcttagcgtcagaagtgtcccaaggaggaaccaacttctcaggtggtcaaagacagcgtctagcaattgcgcgtgccttagctcggaagccagaaatcctcatctttgacgactccttctcagccttggactacaagacagaccgtgtcctacgccaagagttagtagagaaaaccaagtctatgaccaagcttattgtcgcacagcgtatttcaacgattatggatgcagatttgattttggtcttggatcaaggaaaagtcgtgggacaaggcacccacaaggaacttctagctaataatgaagtttaccaagaaattgcctattcacaactatcgaaggaggaattggaacatggaaaataagaaaatgtctctttggaaacagagcaaaccctatcttgcaggcctccagtttgcccttctgatagcctttctagcaacaatcgtatccaatatcattactgtatatggtccaacccgcatcaaggaaatgactaatattattgctagtggtctggaaacaagtgtggatgtcgtggcggttgcagctattggtggttttttggccgtgatttatgtgataggacttctatcaaattatttacaggcatttctgtttacaacagctattcaacgtttttcagagcgtttgagaagagctattgcagagaaaatcaatagcctaccattgggatattttgatggacattctcaaggagataccttgtctcgtgtgaccaatgatgttgatactgcagcccagtccctcaatcaaagtctgggaacagttctttcatccactttactggtcgtggcagtcttggtaaccatgtttgggatgaactggattttagccttggtgacggttgtttcaactcttgttggttttgttttcgtgtccgtctttatgggcaaatcacagggcttttttaagagtcagcaacaagatttggcagctgtcaatggctatgtggaggaaatgtactctggccataatgtggtgaccagttacaatgctatcgagagcacgaaagaagagtttgcgaaattaaacaatcgtctgtatgatagtatctggaaatctcaatttatttcagggattatgatgccgattatgatgtttattgggaattttagctatgccttggtgattatcgttggtgcagccttggccttaaatgggcacatcagtatcgggattatcgttgcctttatggcctacgttcgtatcttttctcagcccctttcacaaattgcccaaggggttactagtcttcagcaggctagtgcagccatgggacgtgtcttcgaattcctagctgaagaggaaatggaagacgaatcccataaagaaagacaattgagcgatatgaaaggtcaagtagtctttgatcgagtctcctttggttatacaccagagcgaaccattattcatgacttttctgcgaccgctcatgcaggtcaaaaggttgccattgtcggaccgactggggctggtaagacaactattgtcaatcttttgatgaagttctatgagattgataagggaagtatccgtatcgatggtgtggataccaaggatatgaagcgttcggaagtacacaatgccttttcaatggtcttgcaggatacttggctctttgaaaggca

SEQ ID NO: 58 - DNA, 314111 bp, Streptococcus mitis NCTC 12261 contig4
gcagccgaacgaccgagcgcagcgagtcagtgagcgaggaagcggaagagcgcccaatacgcaaaccgcctctccccgcgcgttggccgattcattaatgcagagcttgcatgcctgcaggtcgactctagaggatccccctgtgctaggatggtcacctagatcaggaaacagctatgaccccagtgtgctggaaagtcggcagtcagagcttctggacgttcagaaacataggcatcaatgacaccagcctcaagtgcttggcgcatttgagcgaagtctcccatggcagtttcttttttagcgcctgagatttgggaaatcaagtcataaaggtaaacaccttgttgagaagtgattttcgctccattaaagtcatccaaagatttggcatttgcataggcagaatcttttttgacaagtaggacaggctcgctagtgtagtagctgcttgaaaaggcgatttcttgtttgcgttcagcggttggactcatacctgcgataatcatgtcaatcttaccagaagtaagggcaggaactaaaccttcccacttggttttaacaaccaaaggttctttacctaagtccttagcgattttcttggcaatttggacatcgtatccattggcatactggttggttccatcgattttgacagctccgttgctatcatcatcctgggtccagttaaagggagcatatgctgcttccatcccgatgcgtaaatattcatcagcttgagcaacattgacaagtcccagcatcagcaagaaacttgtgaaaatagataagtatatttttctcatgatttctcctatttctaatctattaaaaaataactgtctcctattttatcgaaaaaaactctatttttcaatacaggtaagcccttacttgagaaaaaatgatataatgatagcaaagataaaaagggggtttagttgatgaaaaaaacttttttcttactagtgttaggcttgttttgccttctgccactttctgtttttgccattgatttcaagataaactcttatcaaggtgatttgtatattcatgcagacaatacggcagaatttagacagaagatagtttatcagtttgaggaggactttaaggggcaaatcgtgggactgggacgtgctggcaagatgcctagtggatttgacattgaccctcatccaaaggttcaggcatcgaaaaatggtgatgaactagcagacgttactagcgaagtgatagaaggcgcagatggttatactgttaaagtttataatccaggtcaggagggtgacacagttgaagttgaccttgtctggaatttaaagaacttgctttttctttatgaagatatcgctgaattaaattggcaacctttaacagacagttcaggggctattggaaagtttgaatttcatgtaaggggagaaaaggaggctgaaaaactctacttccatacagggaaactctttaaagaaggaacgattgaaaagagtaaccttgattatactattcgtttagataatcttccgtctaagcgtggagttgaattgcatgcctattggcctcgaactgattttgctagcgctacggatcagggcttgaaaggaaatcgtttagaagagtttaataagatagaagactcgattgttagagaaaaagatcagagtatgcagctcgtcacttgggtgtttcctttgatactttccatttccttgttattgagtgtctgcttctattttatttatagaagaaagaccactccttcagtcaaatatgccaaaaatcatcgtctctatgagccaccaatggaattagaaccaatggttttatcggaggctatttactcgacctccttggaggaagtgagtcccttagtcaagggggctggcaaatttacctttgaccaacttattcaagctaccttgctagatgtgatagaccgtgggaatgtttctattatttcagaaggagatgcagttggcttgagactggtgaaagaagatggcttgtcaagttttgagatagactgtctaaatctggccttttcaggcaaaaaagaagcaactctttccaatttgtttgcggattacaaggtatctgatagtctttatcgtagagcaaaagcctctgatgaaaaacggattcaagcaaaggggcttcaactcaaatcttcttttgaagaagtattgaaccagatgcaagaaggagtgagaaaacgagtttccttctgggggctcccagattattatcgtcctttaactggtggggaaaaggccttgcaagtgggtatgggactctctactatcttgcctttatttatcggatttggtttgttcttgtacagtttggatgtttatggctatctttacctccccttgccaatacttggttttctaggtttggttttggctgttttctattattggaagcttcgtctagataatcgtgatggtgtcctaaatgaagcaggggcagaagtctactatctctggaccagttttgaaaatatgttgcgtgagattgcacgattggatcaggctgaattggaaagtattgtggtctggaatcgcctcttggtctatgcgactttatttggctatgcggacaaggtcagccatttgatgaaggttcatcatatccaagtggaaaatccagatatcaacctctatgtagcttatggttggcatagtatgttttatcattcaagtgcgcaaatgagccattatgccagcgtcgcaaacacagcaagtacctattccgtatcttctggaagtggaagttctggcggtggcttctctggaggaggaggcggtggcagtatcggtgccttttaaagagaactgccatatactgaaaaagtatgctataatggaagatagaaaaaggagtaatctatgtatcttattgaaattttaaaatctatcttcttcgggattgttgaaggaattacggaatggttgccgatttcgagtacaggtcacttgattttagcagaggagtttatccaataccaaaatcaaaatgaagcctttatgtccatgtttaatgtcgtgattcagcttggtgctattttagcggttatggtcatttactttaacaagctcaatcctttcaaatcgactaaggataagcaggaagttcgtaagacttggagactgtggttgaaggtcttggttgccactttgcctttacttgccgtctttaaatttgatgattggtttgatacccacttccataacatggtttctgttgctctcatgttgattatctatgggattgcctttatctatttggaaaagcgcaatgaagcgcgtgctatagagccaagtgtaacagagttggacaaacttccttatacgacagcattctatatcggactcttccaagttcttgcccttttaccaggaactagccgttcaggagcgactattgtcggtggtttgttaaatggaaccagtcgttctgttgtgacggaatttaccttctatcttggaattcctgttatgtttggagctagtgccttaaagattttcaaatttataaaagcaggacaactcttgagctttgggcaattgttcttgctcttggttgcgatgggagtagcctttgcagtcagcatggtcgctattcgtttcttgacaagctatgtaaaaaaacacgactttaccctttttggtaaataccgtatcgtgcttggtagtgtcttactactttacagctttgtccgtttatttgtataagaaaaaccttgaaggggcaactcttcaaggttttatactcttcgaaaatctcttcaaactgcatcagctctatctgcaacctcaaaacagtgttttgagcagcctgcggctagctttctagtttgctctttgattttcattgagctttaaaatccagttacggtaatccccagcaggcggacgcctttttctttctcgtccaactcttcatagagttgcagggctatttggctgatctgactagcatcctgcgttttttgatccagactttttcgtttagtcagagttgaaaagtcttcgtagcggattttcagaatgacaatttttccagctttttcttgttgactgagattgagagcgactctttctgataggagagtcagctcttttttgatgtcttcctcggcacggagaatttttccataggttttctctttcccgattgatttacggatacgattggatttgaccggggaattgtgaataccacgagcctttcgataaaggtcatagcccagtctgccaaaacggtctatcagggtcacttcagggacttcaagcaaatcagcgccggtaaaaacacccatttgatgaagtctttccaccgtcttttttcctactccatgaaacttggaaatatccatttgtttgaggaaatcctcagcctggtcaggtaaaatcactgtcagaccatgtggcttttgataatcgctggccattttagctaagaatttgttgtaggagacgcctgcggaagcagtcaggtgtagttcctgccagatatcctcttgaatgagacgagcaattttgaccgctgacttgataccgagtttattttctgtcacatctaaataggcttcgtcaatgctcatgggttcaatcaaatctgtataacgcttaaagatagctcgaatctggaggcccacagtcttgtatttctcataattccctgagataaagacggcctggggacaacgctcataggcttctttggaactcatggctgaatggacaccaaaagctcgcgcctcatagctacaagtggaaacgacaccacgcccacctgtttgtcgagggtcgctaccgataatgacaggttttcctctgagtttaggattatctctgatttcgaccgcagcaaaaaaggcatccatgtcaatatggatgatttttcttgacaaatcatttaataaaggaaaaatcaacatgtctggtcccctttttactgcttattttcttttattatacccttttttctgaaaaaaagaaaaaaggctttaattttttcaaaaatataatacagtttgggataaaatatagactgttttagaaaagaaagtgtaaaaatagggatttatcacttgttgaaatcggttactgtatggtatacttgtctcatgaatgtaacagatggatgttactagaaagaaaaaagaggacattaacatggttgttaagacagttgttgaagcacaagatatttttgacaaagcttgggaaggcttcaaaggcgtagattggaaagaaaaagcaagtgtgtcacgctttgtacaagctaactacacaccttatgacggagacgaaagcttccttgcaggaccaacagaacgttcacttcacatcaaaaaaattgtagaagaaactaaggctcactacgaagaaactcgtttcccaatggacactcgtccaacttctatcgctgatatccctgcaggatttatcgataaagaaaacgaagttatctttggtatccaaaatgacgaactcttcaaattgaacttcatgccaaaaggtggtatccgtatggctgaaaccactttgaaagaaaatggatacgaaccagacccagctgttcacgaaatcttcactaaatacgtaacaacagttaacgacggtatcttccgcgcttacacttcaaacattcgtcgcgctcgtcacgctcacactgtaactggtcttccagatgcatactcacgcggacgtattatcggtgtttacgcacgtcttgctctttacggtgcagactacttgatgcaagaaaaagtaaacgactggaatgcaatcgaagaaatcgatgaagaaacaatccgtcttcgtgaagaaatcaaccttcaataccaagcattgcaacaagttgttcgcttgggtgacctttacggagttgacgttcgcaaaccagcgatgaacgttaaagaagcaatccaatgggttaacatcgccttcatgtctgtctgccgtgttatcaacggtgctgctacatctctaggacgtgtgccaatcgtattggacatctttgcagaacgtgaccttgctcgtggtacatttactgaatcagaaatccaagaattcgttgatgatttcgttatgaaacttcgtacagttaaatttgctcgtacaaaagcttatgaccaattgtactcaggtgacccaactttcatcacaacttctatggctggtatgggtaacgacggtcgtcaccgtgttactaagatggactaccgtttcttgaacactcttgacaatatcggtaactctccagaaccaaacttgacagttctttggactgacaaattgccatacaacttccgtcgctactgtatgcatatgagccacaaacactcttctatccaatacgaaggtgttacaacaatggccaaagacggatacggtgaaatgagctgtatctcatgctgtgtgtctccacttgacccagaaaatgaagaacaacgccacaacatccagtacttcggtgcacgtgtaaatgtattgaaagctcttcttactggtttgaacggtggttacgacgatgttcacaaagactacaaagtatttgacatcgaaccaatccgtgacgaagttcttgaattcgaatcagttaaagaaaactttgaaaaatctcttgactggttgactgatacttacgtagatgctttgaacatcatccactacatgactgataagtacaactacgaagctgttcaaatggccttcttgccaactaaacaacgtgcgaacatgggattcggtatctgtggatttgctaacactgttgatacattgtcagctatcaaatacgctacagttaaaccaatccgtgacgaaaatggctacatctacgattacgaaacaatcggtgaatacccacgttggggtgaagatgatcctcgttcaaacgaattggcagaatggttgattgaagcttacacaactcgtctacgtagccacaaactttacaaagatgcagaagctacagtatcacttttgacaatcacatctaacgttgcttactctaaacaaactggtaactcaccagtccacaaaggtgtatacctcaacgaagatggttctgtgaacttgtctaaacttgaattcttctcaccaggtgctaacccatctaacaaagctaaaggtggatggttgcaaaacttgaactcactttctagccttgactttagttacgcagctgatggtatctcattgactacacaagtttcacctcgcgcgcttggtaagactcgtgacgaacaagttgataacttggtaacaatccttgatggttacttcgaaaacggtggacaacacgttaacttgaacgttatggacttgaacgatgtttacgaaaagatcatgtcaggtgaagacgttatcgtacgtatctctggatactgtgtaaacactaaatacctcactccagaacaaaaaactgaattgacacaacgtgtcttccacgaagttctttcaatggatgatgcattgagctaatcaattaacttgaataaggaaaaggaaccctcggtcaaacgactgagggttattttttggactattaaattccttaagtcaggtattgaaatgtctgaccgggattcaaagatacttgttgagttgcgggaggtatttgatattcaatgaaaatcaaagagcaaactaggaagctagccgcaggttgctcaaagcaccgctttgaggttgtagataagactgacaaagtcagtcacacatatacggcaaggcgaagctgacgtggtatttttattttcgaagagtatgaaaataaaaataccacactttgtaggtttacaaggtgtggttgtattttatctcttagaccaagttctcttcataaagagaagtaggattggataaatctccaagcgccctgcaatcattgcaaaggagaggagaatttttgagataggactaaagattgagaaactagaagtggttcctagaataggtccgatattattgaaacagctaaagacagcactggtaacgactagaaaatcattgctatctaggctgacaataaagataagggatagcaaaatcatagaatagatgacaaagtacttgagaatcttatgctgggtatctttgtcaatcaccgttttattaacatggagggtcaaaacacggtggggcgatagaattgacaaaatttggtttttggcaatttttgaaaggatgaggcctcgaataaccttgagtccacctgcggttgaaccagcagaaccaccgattcccatgaggaagagaaggataaactgggagaagaggggccagttggtaatgtctccgtaaccaaaaccagtcgttgtaatgatattggaaacctggaagaaggccatttcaaaactctttgaaaatcctggatagagatagagggtattaaggctaatcaagcctgtagaaagcagaacaatgaccaagtaagcacgaagttcctcgtcaccaaagaaggctttgacgcgacggagcatgaggtagtagtagagattgaaatttaccccaaaaaccagaactccgatactaaccagataggtaatcagtgagctgccatagtgggcaatcccgtcgttatagacggtaaagcctcctgtacctgctgtccccatagcaatgacaaaactatcaaataggggcatgccagccagataatagatgatgacaaagagggagaagagagctagataaaggagatagagaatctgggcagtgttttttagtttggatactactttaccaaaaacagggccaggaacctcagccttcatcacttctaggtgactattcttggcattatccataatagcaagtgcaaaaacaagcactcccatccctccaatcaagtgggtaaaacttcgccagaagaggagggaacgactgaggaccgaaacgtcgttcagaatagttgctccagtagttgtaaagccagaactgatttcaaaaaaggcatcgataacgctgggaatttgcttagcaaaaacaaaggggagaccgccaaagaaggaccaaaggatccaacagagggcaacaatcaagactccctccttggcataaatccgttgatttttgggcttttgtaaaattcctgaaccgcctagtaatacgagaatccctattgttgaaaagagggccgtaaagacttggctcgattcacggtaatagacagcgacagacacaggaaccaaaagaagaacagcttcaatcaaaagtaattttgaaaggaggtaacgaatcatacttttattcatttcttacctcgtgatcaagtcataaatcttagtgatgtttggcaacaaagttgttactaggagcttgtctccaacttccaacatatcctccccagtagggaaaatagtcttgccctttcgaatgatggctgctataagaaccccttttttcagttttagttgagaaagaggtttggcagtcattttattagcttccttgatatgaaattgcagggtttcgatttggccattggctagatggtgcatggcctgaaggtctgaatactgggcattaacccgaccacgaataaagtgcataatcgtatctacagcgatgcttttaggtgtgatgatacttgaaaaatcaggcgcattgataatttcgaggagactggtacgattgaccttggtgatatttttttgtacacctaccctgtcaaggaacatagaggtaatcagattttcctcatcaacccctgttagagtcgcaacggcatcatagttttgagcactttcttccagcaggatatcttttgcggtaccatctccttgaacgatgtagaggtttgggaatttctcgctaaagaagctagcgatttcaggattgatttcaataaccttggtatcaatacgactgtcttttaggatacctagtagataataggcgattctaccagctccaacaataagaaggctcttcacggcacgagatttaaaataattatggaagagcatcatatcaacacggttaccagtgacaaagattctatctttatcctgtatggtcatgtcaccgcttggaatgataatttgatgatccctctctatagcgcagacaataacattgccaaattttttacgaaaatcagaaatgggcatttggcaaagaccgctggaagatttaacagtgaattccatgaggctaacgcgtccaccaaagaaacgttcgacagagagggcgttggggaagtcaatgatattcgcgatagcgcgggcagccaagagctcagggttaacgataagagaaaaaccgagaatattcttttccttgaaataagagttagaatattcagggttccgcacccgaacgatggtctctttagctcccatttttttggctagaacggctgcaatcatgttcacttcatcgtattcagtcagggcgataaagatatcacaatcctggacactggcttgctcaaggatggtaaaatcggccccgttaccaaggatacccatgatatcaaagcgattaacaatatgattgagaacagcttcgtcttgctcaatcagcaaaacatcatgcttttctgcaaccaaggagcgacagagggcagaaccaacttttccccctccgacaaggataattttcataataaaacctactttttcatgatgtaactatcataccttttttcaagaaaaaatgcacctactagctaataacaagagcttttagtaggaaatttgctataaggtaaaactataccctaatcaattgaaatagctattagcgactttctctgaaatatggtatgataaaggatatacaaggagataaaatgaataataatttactggtattacaatcagactttggtctggttgatggtgcggtatcggctatgattggagtggctttagaagaatctccaaccttaaaaattcatcatttgacgcacgatatcacgccttataatatttttgaggggagctatcgtctctttcagacggtagattactggcctgagggaacgacatttgtatcggtggtcgatccaggtgtcggctcgaaacgtaagagtgtagttgccaagactgtaaaaaatcaatacattgtcacgccagacaatggaacgctttcttttatcaagaaacacgttggtattgtagccattcgtgaaatttctgaagtggccaatagacgtcaaaacacagagcattcttatactttccacggtcgtgatgtttatgcttatactggtgctaaactggctagtggtcacattagttttgaggaagtggggccagagctcagtgtagatcagattgtggaacttccagtcgtagagacaatcattgaagatcatctggtaaagggagctattgatattctagatgtgcgttttggttcgctttggacctctgtcacacgagaagaattttacaaactggaaccagactttggtgaccgttttgaagtgactatctatcacgcagatatgctggtttatcaaaatcaggttgtttatggcaaatcatttgcagatgtgagaattgggcaacccatcctttacatcaactctctctatcgtttaggtttggctatcaaccaaggttcctttgccaaggcctataatgtaggtgtcggttcatcttggaccattgaaataaagaaaatagaatcataaaataggagaatatagatgaaaaatcaatcaattaaacaagttgttgctatcggtgttggagctgcgctcttcgttgtcatcgggatgatcagcattccgacacctgttccaaatacaagcatccagcttcagtatgcggtacagagcctcttgtctatcatttttggccctctagtgggattacttgttggtttaattggtcatgcagtgaaggactctcttgctggctacggtctttggtggacttggattattgctagtggtctatttggtctagtcgtcggactctttagaaaatacattcgagtaacacagggtgtttttgagttgaaggatattgtcttctttaacctcattcagattgttgcaaatgctcttgtttggggtgtcttggcaccacttggagatgttgtgatttatcaagaagctgcagaaaaagtatttgcccaagggattgttgcgggaattgctaatgctgtaactgtagctatcgcaggtactcttctcttgctagcttattcacgtacgcagactcgttcaggaagtttgaaaaaggattaacataaaggcaaaggctgggcaaccagtctttttcgatgtttatagactagtcaggcaagtaagctaggataggaatctttttggcgctaagattttaagagaagagactgcaagaaggggtagatttatgataaaatagaagtctaagaagcgaatgaagagagtaagatgaaagaagctataattgagtggaaggatttctctttccggtatgaaacacaacaagaaccgaccttgcaaggggtggacttgaccatttataagggagagaaagtcttaattgttgggccatctgggtcaggtaagtctaccttgggtcaatgtttgaatgggattattcccaatatttacaagggtcagacgtctggagaatttttgatcaaggggcaagcggcctttgatatgagtatctatgataagtctcatctggtcagtacagttttgcaggatactgatgggcagtttatcggtctgtctgtggcagaagatttggcttttgctctagaaaatgatgtaacaagtttagaagagatgaaaagccgtgttcataaatgggctgaaaagctggaccttctttctttactgtctcagcgtcctcaggatttgtcaggtggacaaaagcagcgggtcagtctggctggtgtcttgattgatgagagtccgattcttttgtttgatgagccacttgccaatctggatcccaagtcaggtcaggatattatcgaattgattgaccagattcataaggaagagggaacgacgacacttattattgagcatcgtttggaggatgttctgcatcgccctgtggatcggattgtcttgatcaatgatggtcgtattctctttaatgggagccctgaccagctactggcgactgatttattgacccaaaatggaattcgagaacccctttatctaaccactctccgtcaattgggtgtggatttagccaaggaagaacaattagcaaatctggataacttgtctatctcaaaaggccagattcagttgcggacggaactggtaaaagaaaccccagaattgcagtcactctttaaattagaggatgtgtctttttcttatgatgatagaccgattttaaaatccatttatttagatattaaaaagggtgaaaagattgccattgtcggaaaaaatggagcagggaaatcaactctagccaaggccataagtagctttatccagacggaaggccgctatctttgggaagagcaggatataaaaggagattcggtagcagaacgggcggaacgagtaggctatgtgctgcaaaatcctaatcaaatgatttcaaccaatatgatttttgatgaggtggctctagggctccgtttgcgaggtgtgaatgagaaggaaattgaaacgagagtctatgaaaccttgaaaatctgcggtctctatgaattccgtaattggcccatttctgccctgtcatttggtcagaaaaaacgtgtcactattgcatcgattttggttttaggagctgaaattatcctcctagatgaaccgactgcaggtcaggaccagaagaactatactgagattatggaatttctcgaagagttgcatcaaaaagggcataccattgtcatgattactcatgatatgcaattgatgctggattattcagaccgagctcttgtcatggtggatggggaactgattgccgataccgatccagctagtctgttgagcaatcctgagctgttagtaaaagccaatctaaaagaaacttcaatcttcaacttggccaagaaactagacgtggatccacttgctttaacggcattttataaagaaaggagagaaggatgcaagctaaattaatcggttaccagcatagagatactgtgattcatcgcttgtcaggagctggtaaactcctctttttcatccttgtatcattggcggccatgattagctatgataccagactgcttgttctgattgctattttttcggtctttctcctctatttgtcagaaatccgctttaaagatgtttcctttgtagccgtttttgcgacggtatttgccgttttaaacgtcttgatggtctatctcttttctcccgagtatggggttggactttacggagagaggagtgtgatttggcagggaatcggtgcctacactctgaccagccaagagctcttttatctgctaaatctggccattaagtacctttgcactattcctctggctattatctttttgatgacaacccatcctagtcagtttgcttccagtttaaatcaaattggtgtgccttacaagattgcctattcagtcagcctgactttgcgctatattccagatttgcaggaagaattctttactatcaagatgtctcaggaggcgcgtgggatggaattatccaagaaagcttctcttatgcaacgaatcaaaggcaatctgcgcattattacgcccttgatttttagctcgttagaacgcattgataccatcgcgaccgccatggagcttcggcgctttgggaaagagaaaaaacgcacttggtatagttatcaggccttgaaaaaaggagattatcttaccttgctcttggcagccttgtttttagtagctagtttactacttatcttgcagaatcagggacgattttacaacccttggaaatagcttgaaaaaattgaaaaaatcaagtcgtttctattgacaatgattctgaaagtgttatactaagaaagtagtttcgctgatttacttcaaacctgttgtgaggtaagttaacgatgccttaaccacgctgtttgctgagcttgactccgggcagtgtggctatttttttgcaatggtgaaaggaagcaagtcatgacaaatcacattgtattatttgaacctcaaattccacaaaatacaggcaatatcgcgcgtacttgcgctgcgaccaattctcccctccacatcatcaagccaatgggctttcctatcgatgatcgcaagatgaagcgggcggggttggattattgggataagctagagatttatttttacgagagtttggaggatttcatgtctcagatgaagggcaaactctacctgatttctaaattcgctgagaaagtgtattctgatgtggatttatcgactgacgaggaccattattttctttttggacgtgaagacaagggtttacctgaagactttatgcgcgaacatcctgagaaggctcttcgtattcctatgaatgatgaacatgtccgcagtcttaatgtgtctaataccgtctgcatgattgtctatgaggctcttcgccagcagaactttgcaggtcttgagcttgttcatacctatgaagtggataaattgaaataaaaaatgaaaatgaaaatgaacaaaatgcttgcgcttgcaagcgttttttgttatgataaaagagtcttcagggcagggtgtgattcccgaccggcggtgactttaactaggaaatgatcttttccttttatactttgttgacaagctttgcctaaccagaagttatgcctacagcttgtcgcctagtctaaaagaaaaatctctatttccttctctttaaagaagtccgcgagcgcaagctgatgtggtgagattccacaaccgacagtatagtctggatgggagaagacgaaagaatagctttgtctgttctgatagatttatagctaaactgtaaccgcttgcttgaatttccttaatagagtgagagggaacttttgggatataaaaagtgagaatagatagaaaatcctttctaacttcttctgattttatagaaaattggaggaacctgttatgacaaacacacgtcgactttcgaccattgcaattctatcagctatctcatttgtgctgatgtactttgactttccgcttttaccagcggcatccttccttaagatcgaatttagtatcttgccagtccttgtgggcttggtggtcatggatttgcctgctgctctaggaattctcttgcttcgctcactcttgaagctgcttcttaacagccagggagtgaatacttacattggtttgccaatgaatatcgtagctttgggagtttttgtcatcgtatttgctttgatttggaaaaaggaacggacaacccttcgtttcctactaggctctctagctggaactattggcttgaccgtggctatgttggttctcaactatgtttacgctgttcctttgtacgctaagtttgctaactttgatattggaaaaattttgggactttccaactacctaatgaccatggtattaccttttaacttgattgagggagtaatcttttccgtttcattctggttgttgtatattctcttgaaaccaaccttaaaacattatgaaagataaacaaacatttttaatgaagggcagttttgcccttttacttttcgttattcttggctacatggtcaaattttaccctgaaacgctggtcggttttgaccaaccgatacagactgccgttcgaggagacttgccagattacttgactattcttttccgagccatcacacgcctgattgatatcccagtgattatcacttgggttgtcatcgtagcctttatcttttatcgtaagcggtggaagatagaaagtttcttcatgctagggaatttggctttggctggtcttttaatcgtgacctttaaaaatatctaccagcgcccacgaccagctattttacacttggttgaggagaagggattttccttcccaagcggccattctctggctgtaaccttgctggtcggttctctgattgtcattctcagtcaacggattaaaaatccagtctggagaaaaatcgtgcaaatcgtccttggtctctacctagtcagtgtgctggtatcaagggtctatctgggagttcactatccatcagatgtccttgccagtctctgtgtgggcttgggagtcctgtttatcgagtttcccttctatgacaagctccgattccaatggcgatttaaaggcaagcagaagtgagtatcaaattcctttgaggagaaagaaatgaaagtcaatatagcagatcttcatccgactcaactatacttatcagaaaagaagttgcaagatattcagatgctttaccagtcggcagaaacaatccaagtcgatccaatcagtattcttgcctttggaaattgcttgttgattacagatggacatcacagggcttatcaggctttattggcaggtcgggatacgatttctgctgagtgggatagagatggtggtgatgaactatatcatctctatgcgcaagcttgtgaggaaagaatgatttactctgttctggatttaaaaaatcatatcttagctcaagatgagtatgaagcaaaatggtataactggtgtgatggttttaatcaagcagcaactctcttattgaaaaggaaagcagatgaaacaggccttataaataggtagtgcattgtgtcttgttcctttttatactgaaattagtctaatctaacttgttttttaactaaaaatctgataaactatgtagtaattgaatagaaatccgcaagactagtagcctaagggaagtatatcagggaggagagccgtgactgcaagctctctatatgaaagctgggtgaattcacttgcgcatggatttagaaatgaaggtctgacttgtcagatgaaaacggatggtaccgcgtgtcaacgctccgagtggagtttttggcatgtggttttctttttatctacgagcgactgatggaggaaatatgtcaactattgaagaacaattaaaagcgcttcgcgaagaaacgctggctagcttgaagcagattactgctgaaaatgaaaaagagatgcaagatttgcgtgtctctgtccttggtaaaaagggttcgctcactgaaatcctcaaagggatgaaagatgtttctgctgagatgcgtccaatcattgggaaacacgtcaatgaagctcgtgatgtcttgacagctacctttgaagaaacagctaagctcttggaagaaaagaaagtcgcggctcaactggctagcgagagtatcgatgtgacgcttccaggtcgtccagttgcgactggtcaccgtcatgtcctcacacaaaccagtgaggaaatcgaagatattttcattgggatgggttaccaagtcgtggatggttttgaagtggagcaagactactataactttgagcgtatgaaccttccaaaagaccacccagctcgtgatatgcaggacactttctatatcacagaagagatcttactccgtactcacacgtctccagttcaagcgcgtgcaatggatgctcatgatttctctaaaggccctttgaaaatgatctcaccagggcgtgtgttccgtcgtgacacagacgatgcgacccacagtcaccagttccaccaaattgaaggcttggttgttgggaaaaatatctctatggctgatcttcaaggaacccttcagttgattgtgcaaaaaatgttcggtgaagagcgtcagatccgtctgcgcccatcttacttcccattcacagagccatctgttgaggtggatgtttcttgcttcaagtgtggtggagaaggctgtaacgtatgtaagaaaacaggttggatcgaaattatgggggccggtatggttcacccacgtgtccttgaaatgagtggtatcgatgcgactgtttactctggatttgcctttggtcttggacaagagcgtgtagctatgctccgttatggaatcaacgatatccgtggattctaccaaggcgatgtccgcttctcagaacagtttaaataatgattagaaaagtagaaaaggcagatgttggggtgttgtccaaaattgccaaacaaacctttcgtgaaacatttgctcatgataatacagaagagcagttacaggaatactttgaagaggcttatagtttgagagttttgtcaactgagttggaaaatccagaatccgaaacctatttcattatgcatgaagaggagatagctggttttctcaaagtcaactggggaagtgctcagactgagagagaattagaggatgcttttgaaattcaacgtctctatgtgctacaaaaattccaaggatttggactaggtaagcaactgtttgaatttgctctggaacttgctacaaaaaatagtttttcctgggcttggttaggtgtttgggagcataatacaaaagctcaagcgttttataatcgatatggttttgaaaaatttagccaacatcattttatggttggtcaaaaagtagatacggattggttactgagaaagaaattaaggtaagaagatgattcttctattgaaatgataggaaaggaaaagaactagagtgacaactgtcattctggaaaactaaattatgcttgtatcttataaatggttaaaagaattggtggacattgatgtgccatcacaggagttggctgaaaaaatgtcaactacagggatcgaggtagagggtgtcgaatcaccagctgctggtctctcaaaaattgtcgtcggtgaggtcttgtcttgcgaagatgtgccagaaactcacctccatgtttgtcaggttaacgttggcgaagaagaagctcgtcaaatcgtttgtggtgccccaaatgtgcgtgctggtatcaaggttatggtggctcttccaggagctcgcatcgctgacaactacaaaatcaaaaaagggaaaatccgtggcttagagtcacttgggatgatttgttcacttggcgaattgggaatttctgactcggttgtgcctaaggaattcgcagatggtatccaaatcttgccagaaaatgccgttcctggggatgaagtcttctcttacctagacttggatgatgaaatcatcgaactttctatcacaccaaaccgtgcggacgctctttctatgcgtggagtagctcacgaagttgcatccatctatgacaaggcggtcaactttaaagaatttactctaacagaaacaaacgaagccgctacagatgcactttctgtaggcattgaaacagacaaggctccttactatgcggctcgtatcttggacaatgtgaccatcgcaccaagtccacaatggttgcaaaatctcctcatgaacgaaggtattcgtcccatcaataacgtagtggacgtgaccaactacatcctgctctactttggtcaaccaatgcatgcctttgacttggatacctttgaaggaactgacatccgtgtgcgtgaagcgcgtgctggtgaaaaattggtgaccttggacggtgaagaacgtgacttggacgtgaatgacctagtcatcactgtcgcagacaagccagtagctcttgcaggtgttatgggtggtcaagcaacagaaatctctgagaaatctagtcgtgtcgtccttgaagctgcagtcttcaacggaaaatcaatacgtaagaccagcggtcgtctcaaccttcgttctgagtcatcttctcgctttgaaaaagggattaatgtggcaactgttaacgaagctcttgatgcggcagctagcatgattgcagagcttgcaggtgcgactgtgcgtaagggtatcgtttcagcgggtgaacttgatacctctgatgtggaagtttcttcaactcttgctgatgttaaccgtgtccttggtacagaactttcttacgcggatgtagaagacgtcttccgtcgtcttggctttggcctttctggaagtgcagatagctttacagtcagcgtcccacgtcgtcgctgggatatcactatcgaggcagacctctttgaagaaatcgctcgtatctatggttatgaccgcttgccaaccagccttccaaaagatgatggtacagctggtgaattgacagccacacaaaaactccgccgtcaagttcgtaccattgctgaaggggcaggtttgacagaaatcatcacctatgctctaacaactcctgaaaaagcagttgagtttacggctcaaccaagtaaccttactgaactcatgtggccaatgacagtggaccgttctgtcctccgtcaaaatatgatttctggtatccttgatacggtggcttacaacgtggctcgtaagaataaaaacttggccctttacgagattggaaaagtctttgaacaaacaggcaatccaaaagaagaacttccaaatgagatcaacagctttgcctttgccttgacaggcttggttgctgaaaaagatttccaaacagtagcagttccagttgatttcttctatgctaagggaatccttgaggccctctttgctcgtttgggactccaagtaacctatacggcaacatctgaaatcgctagcctccacccaggacgtacagctatgatttcactcggtgaccaagttcttggtttccttgggcaagtgcatccagtcactgctaaggcttacgatattccagaaacgtatgtagctgagctcaacctttcagccatcgaagctgcccttcaaccagctgctccatttgtggaaatcacgaaattcccagcagttagccgtgacgttgccctccttctcaaggcagaagtgactcaccaagaggttgtggacgctatccaagctgcaggcgtaaaacgtttgacagatatcaaactctttgacgtcttctcaggcgaaaaattgggacttggtatgaagtcaatggcttatagcttgactttccaaaatccagaagatagcttaacggacgaagaagtcgcacgctatatggaaaaaatccaagcatcgctcgaagaaaaagtcaatgcagaagtgcgttaaagtatcaatccatcctttggggtggatttttgcttttcaaataacaattcaggatcaaaaatagacagttgaggaacagagaagataaattggagtttaccagtgtataatgtactcatagctcaaagtaccctaagattttttactaaaatgaggatgataaaaatggacagaaatcattgtaaaggctatcaaaaaggagtataatgagtgcaagacatttcggaggtgaaagatgctagaagtaagaagtctagagaaaagttttggacccaagcaagttttgtttggtattgactttcaagcgcgaccaggtcgtattttgggattagtcgggaaaaacggtgctgggaagacaacgattttccacagtattttgaagtttttagaataccaaggagaaattagtctggataatcaggatattcgacaagagacctacgctcggattggctatctgcctgaagaacgcagcctcatgcctaaattgacagtccttgaacaagttcgttacttggcgactctaaaaggtatggatgccaaggagatcaaggaaaaactccctcaatggatgaagaggttggaagtgaaagggaagctgactgataaaatcaagagtctgtcaaaaggaaatcagcagaagattcagctcattattactctgattcatgagccagacttgattatcttggatgagcctttcagtggattggacccggtcaatacagaattgctcaagcaagtcatttttcaggaaaaagaacgtggggcaaccattatcttttctgaccatgtcatgaccaacgtcgaggagctttgtgacgatattctcatgattcgagatggccgtgtggtcttgcatggaccagttcaggatgtccgcaatcaatacgggaaaacgcgtctctttgtttcaagtgaacgaagcaaggaagaattggaaaatcttcctcatgtcaagcaggtaagtttgaccaaacaaggcagttggaaattgatcttagaggatgagagcgctggaagggaactcttcccaatcttgactcaggggcaatacatcgcaacctttgaccagcaagcgccaacaattgatgaaatctttaaactagaatcaggggtggaagtatgagaaatatgtgggttgtaatgaaggaaacctatcttcgacatgtcaaatcgtggagtttcttctttatggtgatttcgccgttcctctttttagccttatctgtaggaattggctatctccaaggatcttctatggctcagagtggcaagatagcagtagtcagcactgttccagctgtgacagacagtcttaaatctaccaatggtctcaattttgattatcaggatgaagccagtgcccaagctgctatcaaggatgaaaaattaaaaggctatctgaccattgaccaagaggatagtgtcttgaaggcagtttatcacggtgaaacttcccttgagattgctattaagctaggagtaacgagcaagttaaatgagcttcaagatcaactcaatcgttcggcagccaatttgtcacaagaacaggaaaaacgcttgggacaaacagttaactttacggagaaaattgatgaatccaaggaaaataaaaaaatgattcaaacctttgcggccgcagggcttggtttcttcctttatatgattttgattacctatgctagtgtcactgctcaggaagtggctagcgagaaaggaaccaaaattatggaggtggtcttctctagtatccgtgctagtcattatttctacgctcgcatgctggctctgcttcttgtgattttgacccatattggcatttacgtcgtgggtggaattgctgccattcttctctttaaagacctaccaatcttggcacaatctggtattttaaaccatataggagaggctttctcgctcaacaccttattgtttgtcttggttagcctctttatgtacgttgttttagcagccttcctaggctctatggtttctcgccctgaggatgcaggaaaagccttgtcgcctttgatgattttgattataggtggtttttttggagtgacagctctaggtacagctggtgacaatctcatcttgaagattggttcatatattccctttatttcgactttcttcatgccgtttagagctattaatggttatgcaaatgggttagaaacttggatttcgcttgctattacgcttgcttttgcagtaacggcaacagtctttatcggacgtatgtatgctagcctcgttctgcaaacagatgatttaggtccttggaaaacctttaaacgtgccttatcttataaatagaagagcctcgcgaaagcgaggttttttagagataaaaagagtggaattcagaaaaatatttttcatatctattgacttttaggggtgaaatttggtattatagtaggcggtattgtttaccccatttgaaaggccccggaaccttccaaatacttttcgatgggaaggaacacccatcaccgtaaacaaaaatcgaactatatataggagaaatcatgaacaaaacaacatttatggctaaaccaggccaagttgaacgtaaatggtacgtagttgacgcaactgatgtaccacttggacgtctttctgcagtagttgctagcgtacttcgcggaaaaaacaaaccaacatttacaccacacactgatacaggtgactttgtgattgttatcaatgctgaaaaagttaaattgactggtaaaaaagcaactgataaaatctactacactcactcaaaccacccaggtggattgaaacaaatctctgcaggtgaacttcgttctaaaaatgcagtacgtttgatcgagaaatcagttaaaggtatgcttccacacaatactcttggacgcgctcaaggtatgaagttgaaagtatttgttggagctgagcacactcacgctgcacaacaaccagaagttcttgatatttcaggacttatctaaggaaaggaacaataaagtatgtcacaagcacaatatgcaggtactggacgtcgtaaaaacgctgttgcacgcgttcgccttgttccaggaactggtaaaatcactgttaacaaaaaagatgttgaagagtacatcccacacgctgaccttcgtcttgtcatcaaccaaccattcgcagttacttcaactgcaggttcatacgacgttttcgttaacgttgtaggtggtggatacgcaggtcaatcaggagctatccgtcacggtatcgctcgtgcccttcttcaagtagacccagacttccgcgattcattgaaacgcgcaggacttcttacacgtgactcacgtaaagttgaacgtaagaaaccaggtcttaagaaagctcgtaaagcatcacaattctcaaaacgttaatcaatacgattatatcaacgtttcaaagcactttgcaaaaattttgcaaagtgcttttttgtcgatttttgagctcaaatagctttgtgataaccttctgataacctcttctaaatttttaaaatcatgatttattttgctttattgagatagtctgcaaatttgtcaatagagtttttctcaccagtttttgtggtgtgagtatagacatctaatgtcacctgactgcttgcatgaccgagacgttttgatgtattagaaggatcgattccaatttcagacataagtgttgcatgtgtatgtctaaacccatgtgggctaattggttttaatttatgctttttaataattcgattcagtacgttattaatgtaatcagcatgcaaaggttcaattttgtcattacttgatatgtaagagaacatatattcatcactaatattcagctttgtaagaggaagctgagattgttctttcagatagaaatttctccattgcttaataatatcgattgtctcatcatcaagatagattgtacgaactgaagattcattctttgtgctcttttcaatcgctttaccgtcaattcttcctagacttttatctatgttcaatagattgctgtcaaagttaatatcagcccattttaaagcgtataactccccttttcgtagtccactaaatgcaagcagtctaaataaagcaaaatgtttaaatggctcagtttctttcactatatcaaggaaatgatgtaattcctccagagaccaaaaattatctgatctagtttttttgattttaggcatgataacattcttcattggatttcgatcaatgtagttcatgttgattgcaaaatcaaaaatttttgaggtataggattttatctgtttgatatttttgaaagtctgagatttttgtgtaataaagttttgacagtctaaaggactgatttggtcaataaatttatcgccaaatattggtagaatatgtattcgatagatattcttagtttgggaagaagttgtttcttcaacggtaccaacataggcattaaaccattcttgataaagttctttataagtgactttggggttagttttgtcggtacttactgtgggggcaacgacaccagcttctaaacgagcttcgtacaattttgcctcttttttggttttgaaccctctctttaagtgcctttttttctttccataagcatctaagccaatgtaaaagctgacatagtataggattcctttttttgttttgtatttgtgtatagacattttttctccgtatctaagttttcggagcttatgtaattgagaaatgagtgtctatctattttttctatcttcttggcggatagcgtattcgtctgttttaatccagctctgccaaactttagaatctttattttggtgattcatataatctataaactcagacataaaacgtttgtttttctcagctaggtattctgagaatatatgacgaaattcatctgaaaaactatcatcaagtggtagtgttaatgccctttcgccaaattcgatactcttctttaacttctccatatcgcttttaaaaggtgtcacagaaccaattttagatgttttgaaactatctgtaacaattttaagatttgatggagcgtgtgggttgctatcaagtcccataatgtaagcgacggaaacattaaagtattttgccaatttttcagcattatcttttttaggtttgcggattccttgattgtatccagaaagtgtaggataggctatatttgtagcttcgctaatttctgtcaatttttttccgctattttctatcagtttagtaatatgattcgtcataagaacctcctttttatcattataacacattttattctttttgaataaaaaagcttgacaaaaattcaaaaaggatatataattcaaaatgaataacaaattaaatggtttcggagcttatttaatttagaaatgaggtgtgaatttatgtcggaaactactttagttgtccagcttcctaaagaattagagaagcaattacgtgctcactatgatgagatgatttcaaatgctgtagcaagagtatttgaagataaagaactttataaacccatggttcgtatgtcaggtttgtctaggtggttagatgtatctacgacaacaatccaaaaatggacgaaagaaggaatgccaaccatggtgattgatggagtgactttatacgataaaagagcagtaacaagatggttgaagcaatatgaaagataggtacttgtatgaatggtgttcagtggatcaagataacaacagatatatttgatgatgaaaaaattcagctaatagaatcaatgccagaaggagatactcttattgtaatatggtttaaaattctggtgcttgcaggaaagcaaaataatagtggcatattaagtctagggaacaaggtttattacacagaagagatgctttcaacagtgtttagacgaaaggctacatctgtaaaattagctctcagtatgtttgaagaatttggcatgatagaaatcatagatggcgctattaccattccaaaatgggagaaacatcagaatatagatggcctagaaaagattagaaaacaaacaagggaacgtgttgctcgccatagacaaaaacaaaaagcactaattaaaggcgagccacaactcattttagactgtaacgttacagtaacggatgaaaatgagaatgtaacgcaagagattaagaacaagagtaagaataagaaagagattgagaatatactggataatagttctagaaagactgaaacttatattccacccaaatattattctttgttagaatccatttcttataagtacaatgatagatttttgtatcctaacaattacactttaacacatgctcagaagatgaagataggcgagtatttggctagtgggtatataactagtgatgaagttattagcatgattgaacggattcctgaggatgcgacttctcctttagcgtatttatttaagtctatggagaatttaaagcaggaacgtatgctggagtgcaaagctattgcccatgaaaatgcccgaaagaagtatatgataaatgagtagatataggactgttctaaagaaatgttatatcactgaggagcaaaatgaaatagtgaataacttgattgaaatgacaaatcatctaagtttttcctcttatgccagaaaaatgttatttaagagctcgcctatttatcttcaatttgattttgaatcttatcatgactttatatttcaagttagaagaattatcaataacttacgtcagttagaaagaatagcagaacaaagtgaagatttggataatgtaaggatatttcactactgcgttgagctgatgatagaatatgaaaagaagacaagtaaacaagtgaaagaacttgtaaaacgactaaataagaaaacgaggtgataggaccatgagaataaaatctgtgttgaaacaggtgtttttgacggaagaagaaaataaaaaactaaatgattgtatgaggaaggaaaatattcgtaatttttctgagtttgctagacaaaaattaatacgaacagatttgaacatccaaaaagtctcttttgaaggtttagttcctttaacagaagagttggaacaagtcggaaagaatatcaattctatagcctgtcttgcaactgtagttgggagaataagctatgaaaacaaaatggatatgtctattttgatgcaaaaaatagttgatgtgatggaggaaaaagatgtttattttcaaaagtaatatggataaggattttgatcagatatgcgaatacatattgaaattaaagcgagcagaattatttcttcatggaattaaacaacaagataaaacgaaggctcgtttgtatcatgcgatgctggaatactatgatgctaaccataaaaaagaaagacatatgagaattttaaaataaggaaacgctgttaaaaattttgcagcgttttttatatatcttcttaaaatatttgtacacacaaatgacagtcaaattgatttttgggattattttatcgagaaggaaagatttctcataatatgactttgcgagctcagagtctgtatacacacactcccaaaatcatcccaaaatttgtatacacaaagtgtatgtactttttgggatgatttgaattttggggaatccccaaacccctgatgaattatacgagcaaaaaaatacccgctatgcgggtgtgtactgacccccaaaagttagacagaaaaaatctaacttttggggtcagtacaaaagcgtttttattgtataaagaatatcaaatagtttgagggttttacttgtcgctgtatttcttcactatcctttttgtaatactcctgctttgttcctgaaatatctacagtgaatacgtcatccttgaaggtataattctcttttcggtttatgatattagagccagtcggttcgattgttgcactgtctttatcaattgtaaaggtgtcggcctctcctttgttgctatttcctttgttacctgaaatggtaaaggcaacttcatttctactctcgtttattcaacggtattcgccatctaaagaattgcttgattggttagaacatgcaattaataaaattgtagatagagacactaaaagtaatgtgataaatcttttcatttacatactttttatttctatattatattaaagaaacattacataagtaagaaagtaattttttaggttgatctctttctttcgggaaaatcattatgtttcggaaagtcaagattttgttattatttatgatatactggtaccgtaattatatccttacagaggttaagtaagggtttcagtacacgtcaatagatgtcaaaatattgattttaagcgatttttgatttttggaaactcattatatcacactacaaatcaataaaaactctaccttttttagataaatatatcatctggatattgaagtttaagccctgctgtcatttcgatggcagggctttttaatatttggtacactaacttcttatctatattttggtagattttaagttgacatctacaaagtttaatgttagaatacattcaaaaatatatttgaatgaggtattttatgattcaaaatgttgttacttcaataatcctgtattctgggacagccgtagacttacttattatcctaatgttattttttgccaaaagaaaaagcagaaaagacatcattaacatctatttaggacaatttctaggctctgttagtctaatattactaagtttgctttttgcatttgtcttaaattatattcctagtaaagagattttaggtttactcggtttgattccaattttcctaggcctcaaagttttgcttttaggagattctgatggagaagctattgccaaagaaggtttgcgcaaagataataaaaacctgatatttctagtcgctatgattacttttgcaagttgtggtgctgacaatattggtgtctttgtcccatattttactaccttaaatttagcaaatttgatagtagctttacttacctttctagtcatgatttatctcttggttttttctgcccaaaaattggcacaagtctcttctgttggagaaattttggagaaatatagcagatggtttattgccgttgtttatttaggattggggatatatatcctggttgaaaataacagttttgacatactatggactatattaggctaggagaaaatattatgaaaaaagatagtatctgccaagtgaatgttataaatcagcaaaatattacaaccgcaacgaactaccttgaaaaggaaaaagtccaaaaatcacttcgcattttaacaaaatttaccgataataaacagataaatatcatcttctatcttcttgctgttgaagaactctgtgtctgtgatatagcctgtttactaaatctcagtatggcatctacttcccaccatcttcgtaaactagccaatcaaaacatcttgggcactagaagagaggggaaaattatatattattttataaaagatgaggaaatcagggatttttttaatcaactaggataacagctatttttactacttttccatgattctagggagctactctatgaaatttcgggtcttcggaatatatagtggaattactttcttaatagtttaaaaacaactggtgtttaaatcggattttctggtgggatgttaggataatcaatagtattatataaaagtatcaatcacatacgagtgatactttgggaaaaaataaaatagtccaatttacttgaccgtgtactatggtacatggtttataatattcagggggtgaaataagatgatttatcgcattagtgagtttgcagataaatgtggagttaataaagaaacgatcagatattacgagcgaaaaaatttattacaagaacctcaccgaacggaagctggttatcggatatattcatatgatgacgttaagcgtgttgggcttattaaacgaatacaggaacttggtttctctttaagcgagatttataaattacttggtgttgtagataaagatgaagttcgttgtcaagatatgttcgaatttgtttctaaaaaacaaaaggaagtgcaaaaacaaatagaggatttaaaacgaattgaaactatgttagacgacttaaaacaacgatgtccagatgaaaagcaattacattcgtgtccaataatagaaacattaacatgagagattaattaacgaaaggagcttttttatgaataaatttaaggtaaacatttcaggaatgacttgtacgggttgtgaaaaacacgtagaatcagcacttgaaaagataggtgctaaaaatattgagtctagttatcgtcgtggtgaagcagtatttgaactgtccgatgatattgaggttgaaagtgcaataaaggcgattgctgacgcaaattatcacccgggcgaagcagaagaaatacaagtgcaatcggaaaaaaggacagatgtaagtttaaatgatgaaggtaactatgattatgattacatcatcatcggttctggtggagctgccttttcatctgccattgaagccgttactttgaacgcaaaagtggctatgattgagcgtggaacggtgggtggaacttgcgttaatgtcggatgcgttccttctaagaccttattaagagcaggggaaatcaatcatctagcaaaaaataatccatttgtgggattacacacttcggcttcaaatgttgatttagcgccattagtaaaacaaaagaatgatttagtaaccgagatgcgaaatgaaaaatatgtgaatttaattgatgattatggttttgaattaataaaaggtgaagcaaaattcgtaaatgaaaatacagttgaagtaaatggcaatcaaatcacagccaaaagatttttaatagctacaggtgcttcttcaactgcacctaatattcccggattagatgaagtagattatttaacaagcactagcttattggaattaaagaaggttccaaatcgtcttaccgtaattggttcaggatatatcggcatggaattaggacaactatttcataacctcgggtcagaagtcactttgattcaaagaagcgagcgtctattaaaagaatacgatcctgaaatttcagaagccattactaaggccttaacagaacagggaattaatttagtaacaggtgcaacctatgaacgagttgagcaagatggagacattaaaaaagttcatgttgagataaatggtaaaaagcgaattattgaagcagaacaattgctaattgccactggaagaaaaccaaatacagaatcattaaacttacatgcagcaggcgttgaagttggttcccgtggtgaaattgtcattgatgattatcttaaaacgaccaattcccgaatttattcagctggagatgtcactctcggtccccaatttgtttatgtagctgcttatgaaggtggacttgctgctcgtaatgcaatcggaggactaaatcaaaaggtcaatttagaagtggttccaggcgttacgtttacttctccatcgattgcaacggttggtttaacggagcaacaggcaaaagaaaaaggatatgaagtgaaaacatcggtattgccgttggatgctgttccaagagcgctcgttaatcgggaaacaacaggtgttttcaaattagtggcagacgcgaaaacattgaaagtgttaggggcgcatgtagtggcagaaaacgcaggagacgtaatttatgcagcaacattagctgtgaaattcggtttaactgttggagatctgagagaaacgatggctccatatctaacaatggcagaaggattgaagctggctgtcctaacttttgataaagatgtttcgaaattatcttgctgtgcaggctaagggaacttttttacaactccctattcaagtgaaccagctaatgctttaagggattttctaagtgcatttgtggtcacaaaaataatttaacactgatgatttcgacatcaaatctataattgataccttaacactgcagagtaataaaggatgaataatatgtcagacttattatccctaccagacattaaaacaatagaaccgccacaagaaaatgaaaccgatatgatgtttaaagttgaagcagtcggaccacctgaacgttgtcctgaatgtggttttgacaagttgtacaaacacagttcaagaaatcaactaattatggatttgcccattcgtttaaagcgagtgggcttacaattgaaccgtagacgatacaagtgtcgtgaatgcggatctaccttctgggaacgcctaatatctgtagatgaaaagcgtagtatgaccaaaaggcttttaaagtccattcaagagcaatccatgtctaagacctttgtagaagtcgcagaaagcgttggtgttgacgagaaaaccattaggaacgtttttaaggactatgtggcactcaaagaacgtgaataccagtttgaaactcctaagtggcttgggatagacgagatacatattatccgtagacctcggcttgtattgactaatattgaacgcaggactatttatgacatcaagcctaaccgtaacaaggaaacagtcatccaacgtctttcagaaatcagtgacaggacttacattgagtacgtcacaatggatatgtggaagccctacaaagacgcagtgaacactatccttccacaagctaaagttgtcgtagataagtttcatgtagttagaatggctaatcaagccttagataacgtcagaaagtctttgaaagcccatatgagccaaaaagaaagacgtacccttatgcgttaaaggtttatccttctaaagcgtaaacacgatctaaatgaacgtgaatcattcctcttagatacttggttaggtaatcttcctgctttaaaagaagcctatgaactcaaagaagagttttactggatatgggatactcctgatccagatgaaggtcatcttcgttatagtcaatggagacaccgttgtatgtccagcaactctaaagacgcatataaagacctcgtgagagccgtagacaactggcatgttgaaatattcaactactttgataaaaggctcactaatgcttatacggagtcaattaacagcattattaggcaggtagagcgaatgggtagaggttactcgtttgatgccttacgagccaaaatccttttcaatgagaagctccataaaaagcgtaagccacgatttaattcaagtgctttcaataaagctatgttatacgatactttcaattggtatgaagtgaatgatcacgacattacagacaacttaggtgtcgatttttccacacttattaagaatttggagaagggtgatttataagcccttttccaccataaaatccgaatacccgaaattttttgatgaaaattactcacaagaaataatatatagaactgtttaaatatcttcaggatagaaaaagaaattgtccaggcacgaagaaactgtatatttgttgctaaactgtacatcatctttatgatacggtatttcgtatttctcaactacataagctccgaaaactaaaatgtgataaccctttgataacctctcgattttcaaaaggattatatatgtaaatattgaggatttatctcttaaaattacttgattttagtgataatttaccataaatatcataatgtagaaaaaaccaggtcttaagaaagctcgtaaagcttcacaattctcaaaacgttaatcaatacgattatatcaacgtttcaaagcactcaaaagtttaccttatgggtgcttttttcgtgtttttttgaaaagttcacctcaaagtttaccttattttcaccttattgttttagagactttaaagcaaattcacctactgtcataggaactacattagaagtatttacataaatctgtgttgttcctgtgtcactgtgtgttagagcctcagaaatagcttctaagctcattcctgcttgtttagcaagcgttgctcctgtatgtcgcagtttatgaggtgtagcatgtgccagctctttatgtcgctttctaatgcttttcattttattgtttagatagtcagcatgtaaaggcttgttgatgtttcctcttgtgtcgatatatgtaaaaacaaattgttctggattactgatgatgccaaactttgctagttcatatttttgttgctctttccaagaggtaagaagttgaagtaaatcattagaaatagagaaaatagttttcttatttccctttgttgattttacttctccatatctatctaaagcttgaattagctgaatctgtgattttgaaaaatcgatatgtttccattgaagagcataggtttcagattttctatcgcctaagaaaaaagtaagataaaataggacataatctttaagggttattttatcattctctaaatcttcttgaaatgctgagaaccattcttggagttgttcatgagttagatataaatcttcctctctctttgactctgcaagttgaatctttttagtagcttttattcgtcttaatatttttgcgattttattcgcttcaatatattccagttcttctgcccagtcaaaaatagaaatcacatagctacgtaaagatttaaagttcgcatattcgttagcttttgatgtcataaggtttaaaataacctgcttgttttgatttagaaactgtattgtataatttccaagaagtggtagtatatgtttttcaaaactacggactatctattagatggaaaaaatgacgacattgatttatcaaatatcgaagtattgttccgtatgacttctgatggattgacagaggaagaaaaggtaatctttcgcgatgagttgattgaattcatgaaagagcataaaaaactttttgatgaggacaaaaaatgagacttaaagaacatagacaacagcgtagaatggttcgtgcggaactggcaaaagaaatctaaacgattgtacgtagtatcagccgttggggaaattgtgagactgatatgcttttgtgaacagctattcagttggctaagttttttgaagtaagtttggatgagtttgtaggataaaatgttcttgacagaattctcgaattattttatactttaaatgcgtatgaacagattctatggcttagcgtttcgtaagtcgttctccctctagcagggggatatagcaagttactttagcttcctagaggtctagttgacttgtctgttgcattttgcgtaatgagttttcatacgcttttttattattcttaggagaaaacaatgaattatgaggatatacgctccagggacatgttagcttttgcccttgggattccaataaaacaattgacagggttgctatatggagtgaaaattgaaaattgttacactacatttacaattagtaagaaaaatggaagtgaacgtaccatcagtgctccaaataagagcttgaaatatgtgcaacgtaagctagctcgattgcttttaaaacggtacgaagaatttttaacagaaaaaaatactaaaaataggatatcacatgcattttttaaaggaaaaagtataaaaactaatgcattacctcatagaaacaaaaggtacgtacttaatgtagatttgcaagatttttttgattcgattcacttcggtagggtacatggtttttttaagaataatgatttttttaaattacctgatgtagcgacagtcattgctcaattaacttgttacgagggagtactaccacaaggagctccaacgtccccaataatttcaaatttaatatgtcaaatccttgactataaaataattgaactgtgtcaagaatatcacttaacatatacaagatacgctgatgatttaactttttcgacaaacgaaaaaaattttgacaataattatcaagattttctagacaaactagataaattagttactcgttctggctttaaaattaatgcggaaaaaactcactttcaagaatataatagaaggcaaacagtaacaggtctctcggtaaataagaaactaaatgtgaaaaaagatttttataaacatactagaagtatggcacatagtttatataaaactggaaaatttatgataaacggtaaagaaggcactctgaatcaattagaagggcggttttcttttattaatgacttggtgaagtacaacaacagattagaagaattaccatctctaaaattaaattcaatagaatacaaaaagaatttacaatttaccgatggaaaggaattcgaagtcaagaaaaatgagcagaaacagatactcgattggaaaaagaatttaagtactttatcaattagagaaaaagactatcaaaaatttattttttataaatattttatagctaatacaaatattactgtagtaactgagggcaagactgacagtagatatattaaagcagctcttcgaaaatactatgcagaatacccagagttagttactaaggaaaaagatgggttcaagtataaaataaattttttacctcgaacaaagaggatgagatatttcttcggttttttgtcaggtggtggatctgaccaaatccaactttttaattactttattaatcgggataaccatataagtcgtaattacatcaaatactttaaagaaatctctgaggatgtacctttgcctcaaaaacctacggtatttttattagataatgagtgggaaatcaaaaagcctctacataatataatcaaagtattgtgcaatgctcaaaatttaaatgataaagatatcattcaaaaaatacataccgattacttgtatcacgtagatttaaatgcctttttaatgacattaccagtagataatttaagtactaaatgtgaagtagaaattgaaaatttatttgatttggaaaaaataaatactgagctaattgaacctcttcacgatgggaagaaatttgatatcaaaaaggagcacggcaatgataaatccatagggaaagaaatttttgcaaacacaatattaactaactacgactctgaaattattgatttttcaaattttaagccattattagataaacttagcgacatatcaaaggattttacaaaatatacttaataacgagctaataggcagatataaagtttaaaggacaagcattattgattttactctaaaaaatctataatgtttgccctttagtattatatctaactctattactattttgtcatattaaacttcttaaactcatccttatatgctttactatcttttttgaaatattgacgttctgagcctgtaatactagcagtgataacatcattcttgtattcatattttaccgttggattgacgaatcctgaaatctcaaaggtttgtgtatcagtatcaatcgtcatgttactagttgaaacttcgacatcgacagttcccttgtcacccttaatggtgatgaccaggttggttccgtagtccccggtttcatagtattccccgtccatgataggtttacttgaacaagcgacgagaaagagagtggtaagagaaagagcaataaggctaagtaattttttcataaatatttcctcctagttggaatttattttacaggaatcgtgttacaaacgtgttaatgatagggtttcaatttaattgcgagacagatgcattagttgttaaactaattttcagtggacattcatccatttttttttatataattttagtcaaccaaatagttgacttataaatttgtgaggaggcgtactatgaaagacgtttatacaagagtaacccaaattgcaagagaacaactataccaattcatgaaggataatcaggtttcacccttaaattatcactttcattactattttgatgactgtatccaaaagtttgccattaaggtaatggagcatcactttaccaatcggaagattgagggattgacgatgatagatgaggacggtattttaatttcctatgaaagtcagaattcgcaagttaaacagtacttcactaagtgtcatgaactaggtcactatatcttgggacattcagggaagcagtttactcaattaaatggaaaaaaagatacgattgacgagagtgaagccaatcttttctctgcttatattctcatgcctgatattgtcttactatcaaaaatttattatcgcttggatagtttcaagcaagtaatgacagagctatccgtatcagcggatgccttggaatttcgattacaagatttattccgctatcgtttgaaacgaaacaatcaagagattaactcaactatttatcaatatcaatcaggtcaaagcaagtttgtcctcagtatttttgagaaagtccatactgagattgaagacgagtaccgagtggtgaaagaagatgtttttgctaaagttctgaatcgcctgagagagtgtcattttgtggcaagtacagagtttcctgagttgctagaaaatagctttcgcaaggaactagaacaagaagatgatattggtacttggttagaatatgactttggacagtcagtgggttacgcctggcgtacagataagttgaccacaaagcaagcaaaatcacgagtcaaaacaatactcctattagaaaagaggtagttatgtatcaacctgataaattaaaacaaaaacgagaagagctaggcttagagcaacaagaattggctgagcttatcggagtttcaaagcaggcttacttcaagtgggaaaaaggcttgtcaaaaccaactaaagtcaatattgctaagttggaaaaagtcttaaagattccagaaggctatttgagtgaagatgaaatctcatctctctataagcaactgacagagccaaatcaggagaaagctattacctacgttcgtgacctgttatcgtcacagaagattgttagcatttctgagaaacgttcagagtatcatgtttacgagaaactttctgctggtattggtgcctctgtttatggtgacctggactatgacgtggtttactacaatgaagaattaccgcatgattttgcttcttgggttgatagaaattcaatggaaccgacctaccagaatggagaagtagctcttatcatagagactggtttcgattatgacggtgctgtttatgctgtcgtctgggattcacagacctacatcaagaaagtctatcgtgaggaagaaggactccgcttagtgtcaatcgataagggttatcctgataagtttgcgccattcgatgagaacccgcgagtcgtaggaaagatcgtcggtcacttcatgccattggaggactagctatggggtattttgactattcatgagaaccaaaaagcgacatagcttttgtggatatgaaatccttctatgctagtgttgagtgtgtggaacgtggactacatccgttgaaaacctctctttgtgtcatgagtagagcggtgaatgctaacggcttgatattagcttcctcgccgatgtttaagaaagtgtttggtaaaaataacgttagccattcctatgacctgccttttgatattaagaccaagaaattcaactattatgtagcatgcagacaaggcctgcctataacctttgattatgtccgatttatcgaagagtgggctaggattactcatatcgttccccccctcgcatggacttgtatattgagaaaaacatggaaatccagtacattttccaaaactatgccagcccagatgacattctcccttattctattgatgagagatttattgacagtatttacatttttgattcttaattagactgtaatacttaagtaggagaattatttataaagatttttaaagaatagacaagataatgtggtaacttctaaaactaacttccagtttcccacaacctagcctttagtatgagaaaaacgcgtgaaatcagtagaaattcttcttagactaacgtccactggttttctttttttgatatataaaggttcaaaagagaaaagactaagaaaaaagtgcacgacaaatagccctaaaacagagtcgtcttagagtaacttccagttgctagcgtttagtgtgagacttttcgatggtgataagatgtgtagttagagaggaaaattccctttatttcaataaatcaggtgataagtgtgtgtcttctggtttgacaaattggcaccccagaagagcagcgatgtcctcgccaaagttgaaggtgaagacgttgtaagcagattttccttgaaactcttctcgtttcaaggaattgacatgggaaatgactagattgacgtctttctgagtcagctggtcaaaggaagtgcccttgggcagaatggctcgcaaaaccgtatggttcttctcaatccgccccttctggtcaggacggctagggtcgcagaagtagaggtgagacttaccatcaatgtctcgctcaagctcctccacataggagaactcagatccgttgtccgttagaatgacagggaacagctgatggaacgcataccctccgtccatgactctttctttcaaagctgcgaatttagtggcgacctccagagcagtcttgttgtccaaaagcaaggcgaagaggaaattgcagaaggaaacgttgaaggtgagcagtagctttccaccaggtctgccgatgaccgtatccatttccaaccatttgaagaaatcatctatttctcgtaactcttggaaatcttggtaggttcgcccaattttcagctctttgggaatagctacttttctggattttctgcgtgccttgaacttgaccatccgagggaaatcaatgggcttggttgttagatagcccagcttggcatgtcgatacaccgtagctttcgacacaggtaggttatgtgtctgaatgatatggtagatgctttgtttcttctggatgcctagggataagatcttgtccatctgataaaaacttttcttgtttaggggaatgccctctctggactccctcaacatagtcttgtactgttcctgggcctttttcgcgtagtaaagatagcggttaaagccacaatccgttctcttttttggacagttgttacagacataaggagcttttttgagaagtgggcaatccgtgcaatcagatttgacggatgttggatgcatgatgcgattgcgcttgatttcctttgaaatcgttgacgggtcttttctaattttctcagcgatggaacggaaagtctcctgttggctgattccagtttggatgtcaatacgttcttctagagtgagatgtttttgttttttcgtcatgaggttcctcctcacgaaaagtctcagacttaattctagcatcattcgtcgtctgagactaacttccagttttgggagagagatggaagttacttttagaagttacggacaagataatgtatctataacgtattagaaagttattgactaatagtcagtgattggttataataaaattgtatactttattacacggagatggtgtaaagtggtaaataacacatccaaatttggaagtcggtcacttaggaactaagtttaatgaccaaaggtgggttcgaaccctaccctccgaaagagttttgatttatgaaaactttttcgaagagtagggtttttgtttttggaggggaaatggcacaacagcttacaaaggaaaatttatatcaattctatactgaaaatattcgatatgcagattttcagttagatgttcttagacgtcaaataagaccattagcaggtgaatattattggtatatttcaaataataaagaaagtcaaattagaaaaaagcttatatatgaattgaaagcattgactaatctatacgcttatattttaggtagcagatttgaattacaattgatgaaaatattacatgaaaattcttcggtagcctttagtgaggctgaattacaaactattattaagagaaaaggtacaacatatgataaatggcataagtgcctagaaatcagttttcaaaaatcaacagatattgattggactgatgtgaatggacaaaatctattagagctctttcgagataagagtaattatttaaaagagtttcaggaatttataacgatgagaaatagattggctcatggtcagtggagtacacaattaaattctgatggaacaaaagaaagtactccagatgctttgaataaatacgatgatatatcaaaattagttttgttatcaaaaaaactagatacaatggttaagatagttgaaacaatagtagtatacagagaaaaaaataatgaaaagttcaaaaataagatatctaatttaattaaagaaaacaaaattatcgactgtagaatcaaaaatagtagccttaaaaaatatgtccaactagaaattaataagtttgataagaagaaaagtcgaaatagataataatttgaaattattaaaaaaatctggcattaatacggttcgcatatattctatttaagatcaatacttccaatatatcgtattagttttcgggaagtcaaaattttgttgttatttatgatatactaatgctacaattatatcctttgatgaggtaaaatttatggataatgtagtgagattacacttgaagactgggactgattctagacaggaattggtggatttctgtttaaatagtaaaaaacagtatgttgctattgggtggagtagtcagagtgaagatctctatcgtgagagttttcaagagtattatcaaagggttaaagaattatctggaagagctaacccagcaattaacgtttttagggatgcaaaagtagacgacttattctggacaagagatctagatggtagatactggatttgtagagttaagtcgcctgttgaagtagtatgtgataaacgattggatattggagcagtcttaccagttgaagcttataatttttgaatgcaagttcctggtcaaattaaatcgtccttcaataggccacgaggtggtactgttgaaagaattcgtgatagaataataattgagtattcgaaaacaatttttaatcaattatcaaacagtaaatattataaggttattccatatgaggataatcttttggataatctaccagattttgacttagaggaacttgtgatatcttatttgcaaatagaagagaactactatgttctatctaattcaatagcaaataaatctactacaattaagatcgagtgtgaaatgatttctagggaggttggcaactttaggaaagctgtggttcaggtgaaaggtaagaaagcgaaagtacttgatgctttagattttaaacaatatgttgaagagggatatatagtttacctatatgcaccgcaagtaattaatatagatcagattgacaatgtgattcgaatagataatgatgacctattagatttttacaagaaaaacaaacccatactcccattatcaataactcagtgggaaactctattcgggagtaataacagctaagttgtttacttgaaatttccctcattcaataaaacttatacaaattttttgaaataaaaaggcagttgaaaactatagaatattgattttacactatttttagtccaactgaaactcatactttccaaaccaggtcttaagaaagctcgtaaagcttcacaattctcaaaacgttaatcaatacgattatatcaacgtttcaaagcactttgcaaagattttgcaaagtgcttttttgtcgattttttagctcgattagctttgtgataaccttttctaaattttgattgcaaggctaggcgtgattaccttatttaatttctatcattttttattttgatgaagggtaacttagtttctacggaataacctttttcggtcataataaaacactcctgttcatagtttcactagatctaaacaggagtgttatttttgcgtctcaatttatgtgttcagtgcctatctacttttctagtaaccaatctataatgtttttcttctcaataccattgtaattggctgttggctgaatcgtatccattgttaatagatattttgggaattgatctttaatggcttctagtggtctaagttctctttctagtgtttctggagcaagtgttgtttcactgacttgataataagtgtagtgaccaagatcagttacaacaacaaaatcaacctcatatttatctaaattaccaacatatacttgtgaatatctacgtctcaattctaaatataccatattttccaagatatgcccaatgtcttctttgtggtctggtaataagagatgtcgtaaacctaaatcaacgggataatatttttctaagcgttgcaataatgctctaccttttacatcaaaacgtggaacggaataaaaaagcaaactatctgtcaaagtcgtcaaataattttccaaagtattatgggagattgaaacgttttggctgaccagggtattgcgaatcttatttgttgatattaagctacctgtactactgagaagggttcggacaatgcgttcaataatagtaggatttggatttcctaatctagttacaatatcatttaacagtattgagttatatattcctcttagataatcaattttttcagcgtaagatgatgtttgcaataagtaagggaaagcactaaagagataattgttaaaaatttctgttgtattcagattttctgtgagagattgacctgatagatattcttcaaatgacaaaggaagaacctctatctcaacataccgaccagtcaagtttgttgctaattggctgctcataaagtaggcgtttgatccagtcaaatagaggtcaacatttggtaggatgaatagactatctgctaccagttcaaatttctcaacatgttgaatttcatctaaaaagatatagtatgttttctcgctaactaattgatcttttatataagcgtataatgtttgaaaatgtcggaggtcatagtaactcagatcctcaaaattgatggatatgatttgatcctcgtctaccccagttgctagtaactcctctttatagagttgaaagagaacagatttaccagctcgtctaactccactcacaactttgatgatttgtcggtcacgatgtcttcttaaaaaatctaaataatgtggtcttttaatatagttcataatagatacctcaaagatagtataatacaaatagacattattttcaaatatttagaaataaattggaatttattttattatttctaaacatttaaaaataatctttttctataatcaaaaaatagtccattttggtatggcatgatagtaaatcttgtgaggttttgtagcaagtattcaaataaaaagcgcatactatcaggaataaaaaacttgatagtatacgttttatcctagaaatatttgctggctgtttttctcaaactgactttttaagaagttaccttatcagcaatttcaaataagtttatggagctatctttggaaaaactgtagaatttcaaaaattactacagaccttgaattttacttatcatttcaatgatttagattgcttacattttgttttgataagttttacggtaatctccaggagaaagtccagtcctttgtttaaaaattttagtaaagtaagaataattatcataccctacttgacaagatacttgtgatatcgagatatttgtttgagataggagagatttagcagcattaatgcgcttatccgttatatatttaacaagagtttctccagtttcttttttaaaaattctagctaaatgatctgcactgagataaacaacatctgctaagatagaacgatttatatcttcatagtagtgatgatctatgtattcgacgatgcgttgaatactatttttttggttttcaatgtttgttgcaaatttcttagcatgtgaccagtaataatcaaagtaatcctgaaaagattcaattgaatgaaagcgtcgttggaataagaaatcatgagtgctgttttggaataatttatgtgccgagattccattttgatctagatatattcctatttgttgagtccaatctagtaaaatttgttgtagtgtgaaagtaggtatttgagaattataagcaagtgaattaattttttctcttaattcgtattcacttaaggtatctaaaaaagtaattgaaagagtttctgttttaaaagaagttgggaaactatgtggaacacatgtaatagtattccaataagaaacatattgttcattataagtgtagagttctttggtatgaaataaaatatcggatattttatggcaactcttatatataatgtttgagtatttactaaagttattagaaatttgagaatgaatctcatatgctaatttgtcactacgttttgatgagtctactctaaaaagacaaacatattgatcaacctggctttccatcttaaacaaacttatcagtttataagaaggttgtgaaattctttgaagttctctttttagttgagaagtccatgatggagtttctacagaataatcttcttcattaagattaatggttaaaactgcgaggaaaaaatactggtgttgtttaagaataaaatcttgtttgctcgctatgttttctagttcatcaatgcgagaaatttgaggttttctaaggtaatcataccagaaattatcttctatttgtaaaagtgaatcattttttccatttaagttatgattctcaattttactaatggctttttgaataataaattctaatttttcaaagttaatgggttttagatagtattcaaagctttgcaattcaattgctttttgagcatagttgaagtcggcgtaattagttaaaaaaattgtttttatatcatatttttcatttctaatccaagataagagttcgaggccgctgccttgaggcatttctatatcgcttatcatgagatcaataggatgctctctaataatattttgagcttgagtgaggctataggcaacataaacaatgtcaatgtgtagtttagcccaatttattttctctcgtaaagcttcaatgataaaacgatcgtcatcaactaataagatgttcattataacctccgtctataatcttgtatggaatgagtaaaagaattttagctccaccttcttcattattttcaaatgcaatactatagtcattaggatagagaagatttaaacgttcgatggtgtttgttatcccgatatgatgtccatcttctgttattagagactgtttctgatttagttttgataaaatttcttcagagaaacctggaccattatcttcgatacaaatctgaatataatctgagtcctcagtttttactttttttattgatagtaaaattgtaaataaatcttgaaatgaaaaaccgtgtttgattgtgttttcaataaatgtttgtaaaagtaatgatggaacaagagtattttgtaaatcagaattgtagtctagtgaaaagtagatactatttccatatcgaatccgttgtatttctaaataatctttaatatgctgaacttcatctttaagttctgaaaaatcttgattagccataaataaatgacggagataatttgaagttaggatagttaattcttcaatttccttgtagttttttgtttgaagcatactatgaatcattgataacatatttaagtagaaatgcggacgaatttgatttttaagataattaagttctatcttcttaagttctagttgtgaatggtattcccgtatttttaattcttgcatgtcaaatattactttattaagtttatcatttgccttatcaatttctagtataccttcagatataaaaaattcagaaggggggatggagtccccaaattgagagagccgttcagtaagtcttgttataggtttaatcatccactgacgaatatacaggataatgatgattgataaaatggtgataatgataggaacagctgataaaaatacttctaagagtgtgatatttctaaagacttcggcataatcgactaaaacataaatatcgaaaggtaaatgtgttttttcattttgtgcatgaattaggtaattagaggacggtatattgttaggctcttttagggaaagtttaccattatttccaatattgagttttttgagaggttttaggatatcttctgaagatatgacggcataaatgatttttccttcgtaatgaacagatttaactaagtattcactgtttttagtagttacatttttccatttacggtcacttatatcactacgcaatgattttagatttgattttaacagtaaataatcttcatatggaatataaagattggagacatttataaaataatcagtactatcggtttctaataagaatgtcatatgagtttcattttgatattcaaactctgcaaagctagtttgaacttttttgagatcttcttgatagtcaagaaacgtttgtacatgatttaatttctctaaagattcattatgcgttattgttgagtacataaagcgttctacagaatgcaatttctcattaacagagtcagcataaatttcaattgaactacgtaggtgtactatattttggtttttaataaaatttctggttatgtcactcatagcaatattgattaaaatatttatcaatagtagtacaagtaggagtttaaagaaaaaatgaatagaatgtttttttgataagtcgtgatttaatttcatatactagtctcctattaaaattatagcactttgaaaatatgatatcatgtaacaaaacagatatgttttattaagatgtcggaaaagtaatagttcttaaaattaaaaaactgaaaaattgataaacctagtccaaaaagttatattaagggaattctttatggtgtaaaataatcgtagaaaatcagatgggaggaaaaacatgaaagtagcatctcaacttcataaaataaaattaaagcatagtattccgttatatatattactttttccttcaatattgctattaattttattttcctatattcccatgttgggactaattattgcatttaaagactattcaccagccaatggtatctttgctagtcagtgggtaggatttaagtactttactcaatttttctcatcattccaattcgggacaactatgttcaatacattaaaaatttcactttatagtattgtagtaggattccccttacctattatactagctataatcagtaatcagttaagagttgggaaatttagaaaaatatttcaagtgacaacttacttaccccattttatctctacaatggttatgtgtgggatgattatcttatttttatctcctactagtggtttgttagcgaatgtatttaagtctgttggaattactattccagatcttttatcaaaacctagtcattttgcaggtgtttatgtttggagcgatgtatggcaacatattggttgggatagtattatttatctagcagcgctttctgcaattgatcctacatattatgaggctgcaactatggatggtgcctctaggttacaaaaaattcggcatatagaattaccattgcttttgccgactgctatgattctattaatattaagagcaggtagtttattaagtgtaggttttgagaaagtgttactactacagaatcctcttaatttagcaggaagtgagataatttcgacctatgtttataaagttggtatggtgaactttcagtatagttattcgacagctatagggttatttaacacggtagttaatctaataattttgttatctgttaactggttctcaaaaagatataccagaacgggtcttttttaaaggaaggagtgctcaaggtgaaatggtttcataaatcaagaaaaacgaactctgaattattatttgatatagttacctatggtttagcaattttccttatcctgttaattgtttatccgttatggtttgtagtgattgcatcttttagtaatccttcagatgttgcaaatggaaaggtatggtttattcctagagaatggaaattagatggatatttacgtcttattcaacaacctttattcttacgtagctatctaaataccattttatatactgttgttggtaccttagttgctttagtagtcaatattccagctggttatgctttatctagaaaagaattagttggtagaaaatggatgagtattttatacataatccctatgttcgtatcaggtggcttgattcctacctacttaacagtaaagaatgttggcctaattgatacattttgggtaatggtaataccttttgcggtttcatcatacaatattattgttgctagaactttctttaataatagtattccagacgggatgtgggaggctgcgcaaattgatggatgtggtacaattcgttattttattaagatagtcgttcctttatcaaaagctattatagcagttattggactttggactgcagttggtatttggaattcgtggtttaatgctttaatttatttaacgaatgaaaatttacagccattgcaattaattttacgacgtttactaattagtaatcaaatgttacaatcgcaagcaacaggagaagtggcatcagatcttcgtatcaaagccgatatgatgaaatatgcagcaattgttatttcaaccgctccgataatgttgctatatccctttgttcaaaaatattttaatcaaggcgtaatgattggtgccttgaaagaataggagaaaaacatgaaacataaatcatttacatatttgttcttaggaaccgttacacttgctggcttaacagcctgtgcaaattccaataatgcgaataaggacgataagtctggagaagattcttataaaatcacaactgttcgttggtctgactggggagaagattatcataaaggttttctaactgattctgccaaagaatcaggtatcgatgttaaatgggatacacttgtagctgcagattgggcagataagaaatctgtgttggttgctagtggagatttaccagatgcatttttaggttcaaatgcttttacagattcagaaattgctcagaatcaatctttatttattccattggaagatttaatcaaagaaaacatgccaaatttaactaaggctatggagaaagaacctaagattaaagctatgattacttcaccagatggtcatatctacagtctacctaaaaaattaccgatgcgtcctactgtagctaatcagctatttattaataaaaagtggctggataatttaggattaaaggttccagaaacttatgatgatttagtaaaagtactacaagaatttaaggataaagatgcgaacggaaatggagacgcttctgatgaaattccattcggagcaggaaactttgatccaacattctcatatattcttccgttcaataatcgtttaggggcagataatacatatgaaatgtctgtaaaagatggaaaaccagtctaccttcgtacagaagaaagttataaacaagggattgcagcaatgcacgaatcttataaaaaaggtttgattgatccggaaatctttacagaagatacctctatgagtgtagcaaaacgtatggataagggagtatctagagtaggtgtttctagtggttggacagcagatgcaacgtttggcttacattcaagtgagtatattgctctacctgctttaaaaggtatggatggtaaacaatatgtcttttctgatccagatcattacaactacggtcgaaatgaaattttgattacaaataagagcaaaaatcctgctaaattattgaaatggttggataaattatatacagatgaagcaagtattcagaatttctatggatcatttggaatagctactgaaaagaatggtgataagtttaaagtgttacctcctaaagatggtaaatcagctgatgaatgggcatggattaattcacttcgagattttggtcctaaatacgtaagcgatgatatcaatagtcgcgtagaaatcgatcaaacacaaggtgatggattgaaattgaagatggaccaagatttgaaacaatttgcgttgccagcttaccctaatgtgatttattcacaagaagagcttaacaaattatcatcaatctatgttagtattgaatcttatgtcaaacaacaagcatctaaatgggtagttgaaggcggcatagaaaaagaatgggactcatacaaagaaactcttaagaatatgggattggacgaatttatgaagattcaacaggaagcatataatcgttaccaaaaagaagtaaaagagtaatactttatatgaactcttggttgtataaacaagggactagctaattacaggaagcgagactgataacatcaaattatctcgcttcctttattctaatttttaaagaaatttagaaatgttttttaaataatttaggtaatatttttgtgcaactgacattctaaagtatagagttaagacgattgattttatggagatatctattatgcaaaaattattttcattagatggaaaagtggttagaattttaacttttttgacagatttaattattttaaatactctatttattgttagttgtattccaatagttacaattggggcatcattaacttctcttacgacaatgtggtatcgtattttaaaaggtaaagataccgatattgcttatcattattttcggatctttagacgaaattttaaacagtcaacttttatttggttgtttatcctcctaatagaattacttttatatgtgaactattgtctttggggctattcaagtttattttcagagtatagtttattgttagtgttgccctttttatttgttataatacttttgatgagtgttatttttccctatattggtttatttaaagataatctaaaaaatagtattgtaaatagcgtattaatttgtattttaaatccaatacaagctatcatgttggttttatttaatatttctgtactgtatatgagttttagtagtccagaacgagttttaacagctatttacgtatttacatttgggggctttgctttttgcggattgatgaatgtaacgataacaaataaaatgtttgataaggtaaagaaatttactaaaaggaggacaacaaattgaaaatttttaagggagagttttatcgaatctctgtattaacagacaagctagtaaggttagaatactctcaaactggaagttttgaggatagaacgacacaacttatctacaatagagattttggccaagtttcgttagattatatcgagacatcaaacgtactagatattatgacggactattttcatctgcactttaataaaggagaatttaacgccgaaaatttatttatagaattaaaaggaaattttgccgtatatggtagtcgctggtattttggtgagtctattgaaacgttaaaaggaacagctcggactctggataaggcagatggagcaatctcgttagaagatggaattattagccgaaatggtatagccttattggatgattctcaaggatttatttgggatgaacagtctggttatattgagagagaaaatcaaattgacctgtatttctttgcctatgggcatgattatagaggagcaatcagagacttttaccatttgactggttcaacacccttgttgccaagatatgctttagggaattggtggagtagatattggccttatacgtcggatgaatacttggatttaatagacagatttaaagcagagaaaattccattatctatcggtgtgttagatatggattggcacataactgacattccagctcgttttggaagtggctggacaggatatagttggaatagaaacttaatacctaatccagaacagttattgcaacaacttcatgataaaaagttaaaactctccttaaatgtccatcctgctgatggtatacgagcttatgaagaagcttatcctcaagtcgcaaaacgattggggttaaatgtagaactagaagaacctgctatttttgatttttttaatccctcttttagagaagcctactttaaagatgttcattataagctagaaaagcagggagtagatttttggtggattgactggcaacaagggacacaaggcatgttggatccactatggcttttaaaccattatcactatcaggatagttgtaaaaattcagaaggtggcttgattttatcaagatatgcaggtcctggtagtcaccgctaccctgttggtttttcaggggatactattattagttggaattccttaagatttcaaccttattttacagcgacagcatcaaatatcggttatagttggtggagtcatgatatcggtgggcacatgctgggggattatgacgaagagctacaaactagatggctacagtttggcgtttttagtccgataactcgattacatagttctagaagtccctttaatagtaaagaaccttggtttttttcagaaacaacatctaagattatgaagaaataccttcgtttgagacatcagatgattccatatctatataccatgaatgtaaagacacatgaggaaggtgccccattaatcagcccaatgtattatttctacccagaaaatgatgagagctataatgttccaaatcaatacttttttggaacagaattgatggtggctcccattgtagaaaagatggatttggcattccaatctgcaaaagtagatgtatggttccctgaaggtgaatggtatgacttcttttcagagaaaaagtacacaggtggtgtgaacttaagtgtttatagagatatttcgactattcctgtgtttgcaaaaagtggtgcaatcattcctttggttggttctgagatagatatgggtgttgatttacctgaagttgtagattggtatgtattcccaggaaaacaacattcttttgaaatgattgaagatcaaaatggtcaaagatataaaacaagattatcaatcaactgggaaatggggatggtagagttaacattacaaggagattctagtatcgttccaagtaatagaaaacatagaattcattttaaaggaacgaatgtgtctatgattgaattgccaaataagaatgatacagctagatttgaatgtaaagataataaaaggatatccctaaatgatgaagtttttagactactaaagacggcttttcttccatatgaattaaaagatagattgttaaatcaattcatcaatgctaaaaattctcatgacttaatgaatatcttgcatcatcaggataaggaattgagagggcgtttgttggaaaagatatttactagcgaaaactaattgagaaatttcgtacacaatttctattatttaatgtgtaacagttttacatctctatgcttattggcttgtattgtagtaactacaagtttggcatagggatttttgtttactgaagaggaaaggataagtatgtttcaaggtttgaaatatttttaaactaaacaagagcaaatttttaaaggagatttttcaacgtaacttccacttgtctgaccgaagtggaagttagtctgaaatttatggtggaattaagtatgagacgttagattttttcagaaaattttctaaaacaaacaggatttgtttgacatttatttgaaaattctgtaaaatgaattattatatcgttaaaggagaatatatatggaaaaacagaaaacattttttggacatcctatgggcttgtccaccctcttctttacagaaatgtgggaacgcttttcttactatgggatgcgagctatcctactttactatatgtactatagtgtgcaagatggtggattgggaatggataagaccacagctgcatcggttatggcgatttatggctcgctggtatttttgtcctcggttatcggtggttttgtcagtgaccgtattttaggaagtcgtaagactgtcttttacggtgggattttgattatgctagggcatattgctttagcaacaccttttggacaagtggctctctatctttctattgccttgattatctttggtactggatttttaaaacccaatatctcagatatggttgggggaatttatgagaaagaggatgatagacgggatgcaggttttagtatctttgtctttggtattaacttaggtgccttcgttgccccttatttagtaggttatctaggtcaggaagtcaatttccatctaggtttctcattagctgccattgggatgttctttggtttggtgaagtatgttttggatgggaagaaatatctgcctgaatcaagtctttaccccactgatccactttcacagaaggaccagcagaccttgattaaacgcttgctgattacacttgtcgtagttattctcgtggttataggtttagtctttactcaccagtttaatgtggatatgattgttaatatctttacagtgattgctgtaattattccaatctactatttctttaagattttatctagtcagaaaataactgccactgagagatcccgagtatttgcctacattcctctatttatcgctggagtactcttctggtctattgaggaacagggttctgttgttctcgctctatttgcggatgatcaaactcaactttactttaatgtatttgggaatcagattcattttccatctagctttttccaaagtatcaatccccttttcattatgatttatgtgccgatttttgcgtggttgtgggggaaaatgggtaaaaagcaaccatcctctgctaagaaatttgcttacggtttatttgctgcaggtttatccttcttgtggatgatgttaccagggatgctctttgggacagatgttaaggtcagtcctctctggttgattatgagttgggctattgtgattgtaggggaaatgctgatttcgccgattggtctatcagtcactactaagttagcaccaaaatccttccaagcacaaatgatgtctatctggttcttgagtaatgcagctgcccaagctatcaatgctcaaattgtaaaattttatacaagcgaaactgaagtggcttactatggaattgttggaggaattacgattgtattcggtattatcttactcttctacgttccacgtattgaaaaactaatgtctggtatcaaatagagaaaaactggaatttctgtaggaattttaaaagttagatcaattatttattcaaaggatttagttctgtattgtatagggctaggtccttttagtttgattaatactcttcgaaaatcaaattcaaaccgcgtcaacgtcgccttgccgtactcaagtacagcctgcggctagtttcctagtttgctctttgattttcattgagtataaaactcacgatgtttctgcttttcctagtggacatttgtctactttttttatataataaaactaaaccaaattggttgagttttaaaagtgactcaactaaagattagcttttctaaggaaaatcatttaagataaggttctatactaggaggtgaagtatgtatcagccagaaaaattaaaggctcggaggaaagagttaaaactgacacagaaggaaattgcagagcaacttgggattagtttccaagcttactcagcttgggaacgtggaatcaaagaaccgtctaaggagaaggtgtttcagctagagaatattttaaaagtgccaaaaggatattttactcagatcgagattgtccgtctctaccatagcctctccaagcaagggcaggagaaggttgttctctatgctcgcaacctatctcaagaggagcaagcccacaaagtgacagctatgccagagcgcctctacgagtaccgtgtttatgaacgcatgtcagcagggattggggcttcggtctacgatgatcagaattttgatacggtttactttaatgaggagttggctcatgattttgcgtcatgggtgtctggggactccatggaacctaaataccaaaatggttcagtagctctgattcgagagacaggatttgactatgacggggcggtttatgcagtggtttgcaacaaccagacctatatcaaacgggtctatcgagaggagaatggattgcgtctggtctctatcaatcctaaatacaaggatattttcatctcctatgaggaagatcctcggattgtggggattatcgttgggaactttgtgccgatggagggctagccaatgggctactttgattattccagagagcccaaaagtgacattgcctttgtcgatatgaaatccttttatgccagtgttgagtgtgtgaaaagaggattgcatccgctgaaaacctcgctttgtgtcatgagtcgcgcggataattcaactggtcttatcctagcctcctctcccatgtttaagaagatttttggccagtcaaatgttggtcgggcctatgatttgccttttgatatcaaaacgcgaaaattttcctattacaatgctcgaaagcaagggctaccgactgactcggactatgttcgctacatcgaagattgggctcaagtgaccttgattgtccctcctcgaatggacgagtacattgcagtcaatatggaaatccagcgaatctttcaaaactatggcagtccagatgatatttatccttactctatcgatgagggctttattgacctgactagttcgctcaactattttatcccagataagagtctctctcgcaaagacaagctggatatgctttctgctcgtattcagagggatatttggaggcagacagggatctactctacagtaggtatgtcaaatgccaatcccttactggccaagttggctctggataatgaagccaagcacactccgaccatgagggccaactggtcttaccaggatgtggaagagaaggtctggtccattcccaagatgaccgacttttggggaattggcaggcggatggagaaacgcttgcatgctctggggattttttccatcaaggaattggcaaccagcaatccagaccagctaaagaaagctctgggtcaggctggtctgcgtttgtggtttcatgctaacgggattgatgagagcaatgttcataagccctataaagccaaatccaagggcttggggaattctcaaatcttgccgagagactacgtgaagctacgggatattgaaattattatccgagaaatggcggagcaggtagctattagattgagaaggtctggtaagaaaacaacccttgtctctatctatgtcggtttctcgaaacaggaggtcaggtcgtctattcacacacaaatgaaggtcgaaccgaccaataatacagctgtcttaacgggttatgttttgaagctatttcataacaaatacacttctggagcggtcagaagtgtcggagttaactattcaggctttgtagacgagtcctttggtttgatttccctttttgatgatgttgataagttagaaatagaagaaaggctccagacggccattgactccattcgggaacaatttggtttcacttctcttttaagagccaatgcactggaagaaggctctaggagccttgccagaagtaagctgattgggggacattctgctggaggattagatggattacaatgatttattgttcttattcaccttttcaatctgcgcgagattatcaaaatccaggtatgcagaaatggatgggattttacctttcagaacacaccagttcgcttagtgaagaaaaaatcgtgttgatttttcgatagatttggacccagttgagaaactacatttactttctcagctttatgttggccaacttaagggaagtttttctatttaagtcaaagcccatcaaaaaatctcactattcattaggctaaaggaaacctaatcatagtgagattgtgaattatagtaatttttgtatggcctcttcaatttgttttgggtctgtttttgaagagaagcgttcaaaaacctgcccatcacgactgatgagaaatttagcgaaattccattcgattcgttttcctagtggaccagatttctggtctttcaaccagacatagaggggatctgtttccttgccgttgaccttgatcttggcaaaacgtgggaagctggtctggtaatgtaggctacagaaggcgttgatttcctctgcgctacctggtgcttgtcccataaactgattgcaagggaagtctaaaatctcaaaaccttggtcttgatagcgatcatagagttcttgaagtccttggtactggagcgttaaaccacatccagtagcagtgttgacaaccaaaataaccttaccacgataggcatctagtagagtttcttgcttgtcttggttcaagactgaaaaatcgtatagtgaagtcattgcttgcttttctccttctgtttggtatttttaggagttttctcctcctgtagtgatagaaatccgtaggtcagggttccaaaaatgcttccgataatcaggccatacatcaggaaaggaacacttttatcgaattgcatgagcaatttcacaaaatctgaaagggacatctgctgaacgaagactttatgaaagatgagtaaggtaaagaagccaatctgaatactgataaacacaatccagcttcggaatttgatttgggctttgctgtaggttttgaggatgatttctgatttgtcatccttttcaagatgaagctcttggacggctttttgagcttttatactcatgaacaaaatgagtccaaaatagatgtagggcataacatttcgaacaatttctataaagcttccgaacaaaatatagaataggaagagaatgaaggaagagtaaaagatttggatcatggaacgggcgcaagccttgtagataacctcttgacggcattcatcaaaaggcccttggatatgaaagaaatttcgaagtaggcgagttgttaagtcttcttttttcatgggtgatttctcctaaatgaacgatgctattttgtttcttttacgaattgatagagataataaagataagtaatagaagaaaggatagcgatagtgagcagtaaataataattccaattgcctgagacgagcatcagttgtggaaaagatagaattataaagtatagtgctaagttgagtatgcgtgtttttggggagttaatctttagataagttagtcctttattaagtcctggaaaaaagactagcacgaggaatatctctctgattggcaagttccctgaaacgatgatgaagatgagcagagaactgaacaaaagatgataggtaagtaaagttactagtgatttcatagggcacctcctaatcctcatcttgctcttttttagtttttgcaatgcgacgggaaatgaggaactgtatgcttgctccgaagaagatagaaccgagaatgcttgatacaccatttcttatagtgagaagagaattaaaatagtccggactttcacctatgagtatactgagaagaggagttataaaaaacatccatagaccaaagaacaaacctgctttaagacctgggtagtatagttgcttgctttctttctcattcagcatatctggatcaatagctgtaatccctgtttttttcatttggtaggtgacatagccagcagcgatgagggcaatcactagaatcagaggaggatagattagagccacttcttgagggtatttataggccagaaggagtggaataagatttccgaaaatcatcagataaaagaggatgataaagacttggttcccaatacgatcggcctcatgccgtttgtattcgtcaaggggaccagaaataccgtatgtgcgtttgatcagtttttcagtgaaggtttcttttttcatgagttggctccttttttaaaaatcatcctcccaaaagagactgttgaggtcagtttggaggcttcgggcgagattgagacagagttccagagttggattatacttgtcgttttcaatcatgttgatggtctgtctcgagacgccgatatccttggcgagttcgagctgggaaatgcccagttccttgcgaaattctttcacacgattcatttgttctcctttctgatttgtgtcgtatatatttgactatattatattcttctaagaaatagatgtcaagcatatttgacatatttcttaaagaaatcttacttgtttttgccctatttgtctgactagtgcaagctggtcggatttatggtaaaatagataggatatgacaaaagaatttcatcatgtaacggtcttacttcatgaaacgattgatatgctcgacgtaaagcctgacggtatctacgttgatgcgactttgggtggagcgggccatagcgaatatttattaagtaaattaagtgaaaaaggccatctctatgcctttgaccaggaccagaatgccattgacaatgcgcaaaaacgtttggcaccctatatcgaaaaagggatggtgacttttataaaggataacttccgtcatttacaggcacgtttgcgcgaagctggtgttcaggaaattgatggaatttgttatgacttgggagtgtctagtcctcaattggaccagcgtgagcgtggtttttcttataaaaaggatgcgcccctggacatgcggatgaatcaggaagctagtctgacagcctatgaagtggtgaaccactatgactatcatgacttggttcgtattttcttcaagtatggtgaggataaattctctaaacagattgcgcgtaagatcgaacaagcacgtgaagtcaagccaatcgagacaacgactgagttagcagaaattatcaagtctgccaaacctgccaaggagctcaagaagaaggggcatcctgccaagcagattttccaggctattcgaattgaagtcaatgatgaactgggagcagcagatgagtccatccagcaggctatggatatgttggctctagatggtagaatctcagtgattaccttccattcactagaagaccgcttgaccaagcaattgttcaaggaggcttcaacggttgaagttcccaaaggtttacctttcatcccagatgatctcaagcccaagatggaattggtatcccgtaagccaatcttgccaagtgcagaggagttagaagccaataaccgttcgcattcagccaagttgcgcgtggccagaaaaattcacaagtaagagggaaaaatggtagataagaaagaaacaaccagtcaattcttgcagaatcgtataaaaaaattctcacgtgtggagaaggctttttatctttccatcgcttttacggctctcgttttagcagtgagcatcatctttatgcagacacgactcttgcaagtgcaaagtgatttaacaaaaatcaatgcgcagatagaggaaaagaagacagagctcgatgatgctaagcaggaagtgaatgaattgattcgttcagagcgcttgaaagagattgcagataaaaaagatttgaaattgaataatgaaaatatccgaacagcggagtaagatatgaaatggacagaaaaaataacccgatttgcgataaaaaatcgtaaatctccagcaaaaaaccgtaggatagttggtaagtacctcagctttgtagctgttgcccttttcgccctctttttggccaattttgcgtatattatcgcaaaaggtaatatatttggtactgacttggtaaaagaggctaaaaaggttcaccaaaccactcgaacagtacctgccaaacgcgggacgatctatgaccgaaatggagtgcctatcgctgaagatgcgacctcttataacgtctatgctgttattgataaaaaatacaagtcagcaacgggtaaaattctttatgtagaggattcgcagtttaataaggtagctgaagtcttccataagtatttggatatggatgaagcttatgtgaaagagcaactagctcaaccaaatctgacccaagtttcctttggagcaaaaggaaatgggattacctatgccaatatgatggctattaaaaaagatttgaaagatgctagtgtggaagggattgactttacaactagccctaatagaagctacccaaatggacaatttgcttctagttttattggtttagcccaactccatgaaaatgaggacggcagtaagagtttattaggaacttctggtctggagagttcgttaaataccattcttgctgggacagacggaattattacctatgaaaaagaccgtgtaggaaatatcgtaccaggtacagaacaggtgtcgcaacaaactgtggatggtaaggatgtttatacaacattgtctagcccgctccaatctttcatggaaactcagatggatgcctttctacaaaaagtaaaaggtaagtatatgaccgcgaccttggtcagtgccaagaccggtgaaatcctcgctaccacccaacgacctacctttaatgcagatactaaagaaggaatcactgaggactttgtttggcgtgatattctttatcaaagtaactacgaaccaggatcaaccatgaaggtcatgacgttagcttcttctattgacaacaataccttcccaggtggagaatacttcaatagcagtgaattaaaaatagcggatgcgacaattcgagattgggacgttaatgaaggtttgaccggtggtggtatgatgacattttctcaagggtttgctcactcaagtaatattgggatgacccttcttgagcagaaaatgggtgatgctacgtggttggattatctaaaccgctttaaatttggggttccaactcgttttggtttgacagatgaatatgcaggccaacttccagctgacaatattgttaatattgctcagagttcatttggacaagggatttcagtaactcagacgcaaatgattcgtgcctttacagccattgccaatgatggcgtcatgctagagcctaaatttattacggccttgtatgatccaaatgatcaaaccgttcgtaaatctcaaaaagaaatcgtaggaaatcccgtttcgaaagatgcagctagccaaacccgtactcacatggtcttggtaggaacggatcctagatatggaactatgtacaatcatagtacaggaaaagcaactgtcaatgttccaggtcaaaatgtagccctcaagtctggtacggctcaaatcgctgacgagaaaaatggaggctacttggttggttctaccaactacattttctcggttgtggctatgaaccctgctgaaaatcctgattttatcttgtatgtaacggttcaacaacctgaacattattcaggtatccaattgggagaatttgctaatcctatcttggagcgagcttcagctatgaaagaatctctcaatcttcaatctccagctaagaatttagatcaagtgactacagagtcttcttatgcaatgcctagcatcaaggatatttcacccggtgatttggcggaagccttacgccgaaatattgtgcaaccaatcgttgtaggtactggaacaaagattaaagagacttctgtagaagaagggaccaatcttgcaccaaaccaacaagttctccttttatcggataaggtagaagaaattccagacatgtatggctggaaaaaagagactgctgagacctttgctaaatggttggatattgaactggaatttgaaggttcaggttccgtcgttcagaagcaagatgttcggactaatacagctatcaaaaacattaaaaaaattaaattaactttaggagactaatatgtttatttctatcagtgctggaattgtgacatttttactaactttagtaggaattccggcctttatccaattttatagaaaggcgcaaattacaggccagcagatgcatgaggatgtcaaacagcaccaggcaaaagctgggactcctaccatgggaggtttggttttcttaattgcttctgttttagttgctttctttttcgccctatttagtaatcaactcagcaataatgttggtatgattttatttatcttggttctttatggtttaatcggatttttggacgactttctcaaggtcttccgaaaaatcaatgaggggctaaatcccaagcagaaattggctcttcagcttctaggtggtgtcattttctaccttttctatgagcgtggtggcgatatgctttctgtctttggctaccaagtgcatctagggattttctatattgtcttcgctcttttctggctagtcggtttttcaaacgcagtaaacttgacagacggtattgacggtttagctagcatttccgttgtgattagtttgtctgcctatggagttattgcctatgtgcaaggtcagatggatatccttctagtgattcttgccatgattggtggtttgcttggtttctttgtctttaaccataagcctgctaaggtctttatgggagatgtgggaagtttggctctcggtggaatgctggcagctatttcaatggctctccaccaagaatggactctcttgattatcggaattatttatgtctttgaaacaacttcggtcatgatgcaagtcggctatttcaaaatgactggtggaaaacgtattttccgtatgacgcctgtgcatcaccattttgaacttggaggattgtctggtaaaggaaatccttggagcgagtggaaggttgacttcttcttttggggagtggggcttctagcaagtctcctgaccctagcaattttgtatttgatgtaagaatggcaccctgatgtttcagggtgtttttgctttttaaaaaatattggtcaattaaagtcaaattccttgaccttttttgactaatgtagtatattatgaacgtaaggtaaatgaaagccttactagaacacttatttaaagtaaaatagaaagaggtggggtctatgtttaatctagaaatctttagaagtaaagatagtctactcctgcttgaaaaagaaaaaccagaaatagtacgtagagtagcgatttagctagtctaaattttttaaagaaaaagtcaaagatagtcaatatcagtaataataaataacaaaaagaggtaaagaatatgaacaacaactttaataattttaacaacatggatgatttatttaaccaattgatgggtggtatgcgtggatatagttcagaaaaccgtcgttacttgattaacggccgtgaagtaacgcctgaagagttcgctcactatcgtgcaactggtcaattgccaggaaatgcagaagctgatggacaaatgaaacaacagtcttcaggtatgaaacaagacggtgtccttgcaaaactaggtcgaaacttgactgcagaagcacgtgaaggtaagttagatccggttattggacgtaataaagaaatccaagaaacttctgaaattctttctcgtcgcacaaagaataatccagttctcgtcggtgatgctggtgttggtaaaactgcagtagtagaaggattggcccaagctatcgtgaacggtgacgttcctgcagcaatcaagaacaaagagatcatttctattgatatttctggacttgaagctggtactcaataccgtggtagctttgaagaaaacattcaaaacttggtaaacgaagtcaaagaagctggaaatattatccttttcttcgacgaaattcaccaaattcttggggctggtagcacaggtgatggtcaagggtctaaaggtcttgctgatatcttgaaaccagctctttcacgtggagaattgacagtgattggcgcaactactcaagatgaataccgtaatactatcttgaaaaatgcagcccttgctcgtcgtttcaacgaagtgaaggttaatgctccttcagcagaggatacttttaaaatccttcaaggaattcgtgatctctatcaacaacaccacaatgttattttgccagatgaagtcttaaaagctgccgttgattattctgttcagtatattcctcaacgtagcttgccagataaggctatcgaccttgtcgatgtaacggcagctcacttggcagctcagcatccagtaacagatgttcatgctgttgaacgtgaaattgaggcagaaaaagacaagcaagaaaaagcagttgaggcagaagattttgaagcagctctaaactataaaacacgcattgcagaattggaaaagaaaatcgaaaaccatacagaagatatgaaagtgactgcaagtgtcaacgatgtggctgaatctgtagaacgaatgaccggtattccagtatctcaaatgggggctacggacatcgaacgtttgaaagatatgggtcatcgtttgcagacgaaagttattggtcaagataaggccgttgaagcagtagcaaaagctatccgtcgtaaccgtgctggttttgatgaaggtaaccgtccaatcggtagcttcctctttgtaggtcctactggtgttggtaagactgagttggctaaacaattggctctagatatgttcggaacgaaagatgctatcatccgtttggacatgtcagaatacagcgaccgcacagccgtatctaaattgattggtacaactgcaggttatgttggttacgatgacaacaacaataccttgacagaacgcgtccgtcgcaatccatactcaatcgtccttctcgacgaaattgaaaaggctgaccctcaagtcatcacccttctccttcaagttttggatgatggtcgtttgacagatggtcaaggaaatacagtaaacttcaagaacactgtcattattgcgacctcaaatgctggatttggctatgaagccaacttgacagaagatgcggacaaaccagaattgatggatcgtttgaaaccttacttccgtccagaattccttaaccgtttcaatgctgtcatcgaattctcacacttgagcaaagaagatctttctaagattgtagaccttatgttggttgaagttaacaagacgctttctaagaaagacattgacttggcagtgagcgaagctgctaaagaatacatgactgaggaaggctacgatgaaatcatgggtgttcgtccactccgtcgtgtggttgaacaacaaatccgtgacaaagtcacagacttccacttggataaccttgatgctaagcacctagaagctgacatggaagatggtgttttggtcattcgtgaaaaagcctaaatcaagattttgaaaataaaaaaaggaaccagttcaaaagctggtttcttttttattattagatgacatgacgttcaaaggcatcgtcagagattccttgttggagaatcaattttgcccattctttagctgaaaagaggctgtgatccttgtagttaccgcaagattcgatggttgttccagggacgtcttcccaagtagtagtctcagcgatttccttgagcgaatccttgatgacggccgcgatttcagcactggtgtggcgcccccacataatcatatggaagcctgtgcggcaaccaaatggtgaacagtcaatcatgccgtcgatgcgggtacggatgagcttggctaagaggtgctcaatagtgtgaaggccagcggtagggatagagtcttcgtttggttgcactaaacgaatatcataattggagatgacatctccctttggccctgtttcttccccgatcaagcgaacatagggtgctttaacaatggtgtggtcaagttcaaaactttcaacaataacttcttttgacatggtaaatcctttcagttttctaatttcattataacataaagccagctcttgagacagagagaaaacctctccgaggctggagaggttgaaatctttatttacgatacaagcggtcgtattggtagtaagggtcaaaggttacattgatacccaatttgcgaaggacattcttgtcttcatcggttaagatgatggttgagtgggcttcgcttcctttgaggttgccaagttcttccatagcacgagcagcatcaggattttctgtagctgtgatagcaagtgcaatcaggatttcatttgaatgaaggcgtggattgcggctaccgagatgatcgattttaagaccttggattggcttaacaacttcaggttcgattagttttacttctttagcgatgtcagctgatttcttgatagcgttgataagagcagcggctgtagggccaaagagctctgagttcttacctgtgacaatttctccgcttggcaattcaagggctagggctggtccaccagtttcttctgctttttgacgtgcagcaacagcaaccttacggtctgctggtgtgataccgaggtcattcataagcaactcgattttcttgacagctgcttcaccaactttttcggctttaaaatcaagaacagtttgatagtagcggcggatgatttcttgtttagaagcttcgacagcagcttcatcatctgtaatagcgaaaccaaccatgttgacacccatatctgtcggagaagcgtatggagatttaccaaggatacgttctaacatgcgcttgagcactgggaaaatctcgatatcacggttgtagttgacagtggtttctccgtaggtttggagatggaaggggtcaatcatgttgacatcatcaaggtcagctgtggcagcctcgtaggccaaattgactgggtgatgaaggggaagattccaaactggaaaggtttcaaatttagcgtaaccagacttgataccattgatttggtcgtggtacatattggacatacaggttgccaattttccagaaccaggtccaggagcagttacgacgatcaagttgcgactggttttgatgtagtcattttttcccatgccttctggagaaatgatgtgatccatatccgttggatatcctttgattggatagtgaagataagaatcaattccgtttttctcaagttggttgcggaaggcatctgcagctggttggccagcgtactgtgtgatgacaacggagccaacaaaaattcccagttcattgaatttgtcaatcaaacgaagaacttcttggtcataagaaatgcccaagtcaccacgtgctttggaatgttcgatgttgttagcattaatggcaattacaacctcgacttgctctttcaattcttgcaagagcttgattttgttgtcaggctcataaccaggaagaacacgagcagcgtgaaaatcttctaacattttgccaccaaactccaagtagagcttgccgtcaaattggttaatgcgctccaaaatgtggtcgcgctgtagattcaaatattgttcagaactaaaagcttgttttttcatttttttacctctgacctctattataataaaaaaatggaagttaggaaactatggagttaaaaaaggaatcaaaaagattaggcaaacgcttgcataaaaatctgaaaagcgctatcatagactgtagattattaaaataatgaggtaagaagatgcaagaaaaatggtggcacaatgccgtagtctatcaagtttatcctaagagctttatggatagcaacggagatggaattggcgatttgccaggtattaccagtaagttagactatctagctaagttaggaatcacagcgatttggctttctcctgtttatgacagtcccatggatgataatggctatgatattgctgattatcaagcgattgcagctattttcggaaccatggaggatatggaccaactgattgcggaagctaagaagcgtgatattcgtatcatcatggacttggtggtcaatcatacctcagatgaacatgcttggtttgtcgaggcctgtgaaaatcctgatagccctgagcgagactactatatctggcgggatgaacctaacgatttagattctatctttagtggttctgcttgggaatatgatgaaaagtcgggtcagtactatctccactttttcagtaagaaacagccggatctcaactgggaaaatgaaaaacttcgtcagaaaatttatgagatgatgaacttttggattgataaaggcattggtggtttccgtatggatgtcattgacatgattgggaaaattcctgacgagaaggtggttaataatggtcctatgctccatccttatctcaaggagatgaatcaagcgacctttggagatcaggatctcttgacagtaggggaaacctggggagcaactccagagattgctaagctttactctgatccaaagggccaagaattgtctatggtcttccagtttgagcatatctgtcttcagtatcaggaaggtcagcctaaatggcactatcaaaaagagctgaatatcgctaagttgaaagagattttcaacaaatggcagacagaattaggagttgaagatggctggaattcgcttttctggaacaatcatgacctccctcgtatcgtctcaatctggggaaatgaccaagaataccgcgaaaaatctgccaaagcctttgccatcttgcttcatctcatgagagggactccttatatctaccaaggtgaggagattgggatgaccaactatccgtttgaaacactggaccaagtagaagatattgaatccctcaactatgcgcgtgaggctcttgaaaaaagtgttccgatggaagaaatcatggacagtatccgtgtcattggacgtgacaatgcccgtacccctatgcaatgggacgagagcaaaaacgctggtttctcaacaggtcaaccttggttggcagtgaatccaaactatcaagcaatcaacgttcaagaagcgctgacaaatccagattctattttctatacctatcagaaactggttcaaatccgtaaggagaatagctggttgattcgagctgactttgaattgcttgatacggttgataaggtctttgcctatatccgtaaggacggtgaccgtcgcttcctagttttggctaacttgtccaatgaagagcaagacttgaccgtagaaggaaacgtcaaatcggttttgattgaaaacaccgtggctcaggaagtttttgaaaaacaaagcttagctccatgggatgctttctgtgtggaattactataaacattttttacagaaaaatttaaaattgaaatcgtataaaaacaagggaggactgtatgaaagacagaaatcctttgtttttttatgactaaagtttataaactttcattctcaaaattcaattaactttacaaattcccactattttggtaaaataaacttatgttataaaaactaacataaaggagaaagaagatgaatacaaaaaagcgtgttcttagcgcaggcctgacctttgcggctgctttgcttttagctgcttgcggacaatcaggttcagatacaaaaacttactcatcaacctttagtggaaatccaactacatttaactacttgttagactactacgctgataatacagctatcattactaacctagttgatggtttgcttgaaaatgacaaccacggaaacctagttccatctttggcagaggactggtctgtttcaagcgacggtctgacttatacctacaaattaagaaaagatgctaaatggttcacggctgacggtgaagagtacgccccagtcaaggcccaggattttgtgacaggtatcaagtacgcagtggataataaatcccaggccattgacttgattcaaaactcgatcaagggcttgaatgattatattacaggagcggattctgacttttctaaggttggagtgaaagcaattgacgaccagactgttgagtatactttggcgcgcccagaaccttactggaactcaaaaacaaccaatagtatccttttcccagtgaatgaagaatttctaaattcaaaaggcaaagattttggtaccttatctccagatagtattctctacagcggaccttatttgttaaaagatttcacatcaaaatcatcgatcgagtatgtgaagaacccacattactatgatcatgacaaagtatcaattgaacacgtaaaattggcttactttgatggttcagaccaagaattgaccatccgtaactttgaaagtggagcttattctatcgctggggtttatccaaatagttctaactttgctaagaccaaggagaaatataaggataatatcgtctatagcttgcaggacaagacttcttggtatttcaatttcaacgtcaaccgtaaggcttacaaccatacgtctaaaacgacagatgagcagaagaagtcaactgagacagctgtcttgaacaaaaacttccgccaagcggtgaactttgccctggaccgcacagcctattctgctcagtcaaacggggaagaagcagctagcaagactcttcgtaacaccctagtgcctcctacatttgtccaagttggagacaagacctttggagaagtagttgcttctaaattggtcaactatggcacagaatggtcagatattaacttggcagatgctcaggatgcctatttcaacaaagaaaaagcccaagcaaaatttgcggaagctaaaaaagaattggcaagtcaaggtgtgactttcccaattcacttggatgttgcagttgatcagactagtaaaaatgctgtgacaggcatgaactcagttaagcaaacccttgagtcggttttaggtgctgataacattgtcattgatgttcaacaactttcaacggatgattttaataatgtagcctttttagcgccaacaccagctgatcgtgactatgatttgaactttgatggttgggtaggtgactaccaagatccgtcaacttatcttaatcctttcaatgcagaggatggattctacctcaagatttttggtctagatgctcaagaagataaagctaagattgctagcttgggacttgatacttacaccaagatgctcaaagatgcagatagcgaaaataaagatgtagccaaacgctatgaaaaatatgctgaagcacaggcttggatgattgacaattctctgattatgtcagcaatgtcaagtggtggtacagcatctgtaaccaaagtaacgccatttacaagaggctattcactggtcggcatcaagggtgatggcaataactacaagtacatgaaactgcaaaaagatactgtgacaaccaaacagtatgaagaagctaagactaaatgggagcaagaaagtaaaaaagcaatcgaaaaagctcaaaaagaagcagaaaatcatgttaaataaagatgaatgaggttccgtaagggacctttttgatgtttatatagtaaatttattgatgtaattgtttgcaaatcaaaaagaatgtttcggaaagaagatgaaaacgccttacctaagcggatttatctcacaagtgtatttttttatgatataataaaatgaaataaaaattgataatagaggtatatcgtgagtagatcttcgaagcgagctcgtcagggtaaaacaaaaatattgattagttgggggttgctagctatctatgcattactagcagtctttttattgtttttgattttcaagtacaatatgctagccttccgatatctcaatatagtggtcactgtcttaattgtagccttagctatcttgtgcttctttttaattcggtccaagaaagttcaaaatctaacgctgattttattactacttggtgtgttaatcactggtacttctctctttgccgtagggcagttcattggatttaccagtcgtttgaatgcaacatcgaattactcaaattattcgatgagtattgcagtgttagcagatagtccaattgataatatcagtcaggtaagcagtgtgatgggaccgactgggacggataaggataatatccaacagttgatgaatgatcttaaggatagtcaaaatagggaattgactgtcgaagaaagtagctcctatcttgcggcctataagagtttgctagctggtgatacaaaggcaatcattctaaacagtgtctttgaaaatattatcgaatcagaatatcctgactatgcttcaaaaattaagaaaatctataccaaagaattaaccaagacggttgaaactccaaaagatatcaaaggtaacagtttcaacgtttatatcagtggaattgatacttacggtccaatcagttcagtttctcgttcggacgtcaatatcattatgacagtgaatcgcgaaactaaaaagattctcttgacaacaacacctcgtgattcctatgttccaattgcagatggaggcaacaatcaaaaagataagttgacccatgcggggatttatggagtagatgcttcaatacatacactggaaaatctctacggtattgatttgaactattatgctcgtttgaatttcacttctttcttgaaattgattgatctccttggtggagttgatgtttataatgatcaggattttacatcattacatggtaagtttcattttcctatagggaatgtacatcttgattcggagcaagctcttggttttgtgcgtgagcgctattctttggcagatggagatcgggatcgcggccgtaaccagcaaaaggtcattattgcaattctgcaaaaattaacctctacagaagctttgaaaaattatgacagtattataaaagggctgcaagattcgattcaaaccaatatgccacttgaaaccatgatgaacttggtcaatgcccaacttgaaagtggtggaacttataagatcaattcacaagatcttaaagggacagggcggatggatttaccatcctatgccatgcctgatagtaacctctacatgatggagataagtgatagcagtttagagtcagtcaaggctgcaatcaatgatgtgatggaagggaaataagacaaaatgattgatattcattcgcatattgtatttggtgtggatgatggtccgaaatctaagcaagaaagcaaggcgcttttgacagaagcctatcggcaaggggtaaggactattgtatcgacatcgcatagacgaaaaggaatgtttgaaactcctgaggagacgatagaggcaaactttcaagaagtgaaggagctagccaaggaagtggctccagatttgaacattctctatggagcagaaatttattatacccatgatgtgcttgagaagttagaaaaacaggtgattccaagtctcaatgggacacgctatgctctcattgagtttagtatggctaccccttacagggaaatccatactgccttgagcaatgttctcatgcttgggataacgcctgtagttgcccacattgaacgttaccatgaattagaaaataacgaaaaacgtgtaaaagagttgattgacatgggctgctacactcaaatcaatagctcaagtattttaaaaccaaagttatttggggataaatataaatttatgaagaaacgagctcgctatttcctagagcgtgatttggtacattttgtggcgagcgatatgcacaatttagaccaaagaccgccttacatgaaagaagcttatgagatcgtctcaaaacaatacggtgaaagaaaggcgagagaattatttatcgaaaatcctcgctttatcttggcagatcaaattatttaggagttgacatgaaagaaaataaagaaatcggaattgatgttgttcaattatttaaaatcctttggaagaagaaactcgctatcatactaactgcggttgtgacagcgttacttgcatttggcttgagtagttttgtgttgaaaccggaatatgctagtacaacacgaatctatgttgttagtcgcaatcaatctgaaaatacagggttgacgaatcaggatttgcaggcaggtacctatcttgtaaaagactataaggaaattatcctttcgcaagatgtactggaaaaagtcatttcaaatcttaaattagagaaaacagttaaagaactaactaagaaaattcaggtgacagtaccggtagatactcgtatcgtatcgatcgttgttaaggatgatcaaccagaagaagcaagtcgtatcgcaaatgctcttcgtgaagtggcagctgaaaaaatcattaaggtaactcgtgtatctgatgtaacaacattagaggaagctagaccagcaataacaccatcctcacctaatattcgtcgaaatactgcacttgctttcctagtaggtggagcagtgatggttgttgcagtcgtattgcttgaattattggacgatcgtgtcaaacgaccagaagatgtcgaagaagtcatgcaggttgcacttttaggaattgttccagatttggataagttaaagtaagggagaaaacatgccaacattagaaatctcaaaaaagcgtttagattttgctaaaaaagctgaagaacactataatgctttgcgtaccaatattcaattgagtggtgataatttgaaagttcttgctatttcatctgtcaaacctggtgaaggaaaatcgacaacgttaactaatatcgcctgggctttcgcgcgtgcaggctataaaacattgctagttgacgcggatatccgtaattcagttatgtctggtgtcttcaagtcaagggaaaaaattactgggttaactgacttcttagctggaactactgatctttcaaatggtctctgtgataccaatattgataacctatttgttattcaggcaggaccgatatcacctaacccaacggccctcctgcagagtgaaaatttccataccatgattgataccttgcgtaagtattttgactatgtcattgtggatactgcaccgattgggatggttattgacgccgctatcattacacaaaaatgtgacgcttctatcttggttacggcagctggagagacaaaacgacgtgatatcttaaaggcaaaggaacagttagaacaaacaggaactccttttttaggtgtggttctaaataaattcaacaccgaagttgaaaaatatggagcttatggtggttatggagcctatggttcctatggaaattatgggaaaaagaagtaggtagagttacctaggaggtagttttgagagaagtatcaaatattcgaaaactagagattctcataatacaactgtttccaatttatctgttatcgtttgtattagctagtcatgaacttctggtatttctgatggtggttcacactatttcttactacattagtgcatatagtaaaaatttcaaataccggacccttgcagaggaatgtatacaaacgttaaaatatatactggtttatattttcttatcctgtctagtttttcctattttagaaccaaatataccatatttatcattagctaatctattatgcattgtgactgtaaattcaattatgctaatgattgtcaatatttggattcgtaagatttggaaatatctatcacttcaaaaaaaatatactcagcgtatcttgctagtgaccacacgtgcacgagttgagagagtactaaagcaactgtctacttatgagtatggctatgtttcagctgtttgtattgtggatgatgagcattttgagtcttctaatttgacaatcgttacgttggataacttagtaacctatgctacgagatcagtcgtagaccaagtggtgattaatctcccaagcgagagctttttaattgcagattttgtttctaaatttgaaacgatgggtttaccagtagctgtcaatatagcagctttagattttgtgaccaatggtgaaaaagcgattcaacgctttggaaattctagtgttgtcaatttttcaacaaccttttatcgttcgagtgatgttgctttaaaacgaatgatggatataatcggatccttatttggtctagttctttgtggcatagcgtctatttttcttgttcctctgataaaaagagacggagggcctgctatttttgctcaggataggattggtaggaatggacgtatatttaaattctacaaatttcgttctatgagagtggatgctgaggaaattaagaaggacttgatgagtcagaatcagatgcagggtggaatgtttaagattgaaaatgatccacgcgtgacaaagattggacactttattagaaaaacgagtctagatgaattgccacaattttggaatgttctaaaaggggatatgagtttagttggtactagaccaccaaccttggatgagtatatgaagtatacacctgaacaaaaacgtcgtctaagttttaaacctggaatcacaggcctttggcagattagtggtagaagtaatattaaaaactttgatgatgtggtgaagttagatgttacttatttagatggctggacaatttggaaagatattgaaattttattgaagactataaaagttgtagtaatgaaagatggagcaaagtaatttttgttttatcataaaatgaagtaggagtgatatgagaaaatcagtttatatcattggttcaaaagggattcctgccaaatatggaggttttgaaacttttgttgaaaaattaacagaatctcaaaaagatagcaacataaaatattatgttgcttgtatgcgtgaaaattcagctaaatctggtattacagatgatcggtttgaatataacggagcagtctgttttaatatagatgttccgaatatcggcccggcccgagcgattgcctatgatattgctgcagttaataaggctatagaactagccaaagaaaacagggatgaagctccaattttttacattttagcttgtcgtattggtccttttatttcaaaaattaagaaaaaaattcaggacattggaggcactttacttgtgaatccggatggtcatgaatggctgcgagcaaaatggagcttgccagttcgtaaatattggaaatattctgagaaacttatggttaaacatgccgatttattggtctgtgacagtaaaaatattgaaaaatatatccaagaggattataagcagtatcaaccaaagaccacctatattgcctatgggacagatacagctccttcaagcctgaaagcagaagatgccaaagttcgagactggtatcaggaaaaaggagtttgcgaaaatggctattatttagtggtggggagatttgttcctgaaaacaactacgaagctatgattcgtgaatttatcaaatctaagtctcagaaagactttgtcctcatcacaaatgtggagcagaataaattttacgatcagttgttacaggatacgggttttgacaaagatcctagggtcaaatttgtcggaactgtttatgaccaagagttgctcaagtacattcgtgaaaatgcctttgcttatttccatgggcatgaggttggagggaccaatccttctctactggaagctctagcagccacaaaactaaatttgttgctagatgttggttttaaccgtgaagtcggtgaagatggtgctctttattggaagaaagaccagttggcaagtgtcattgatcaggctgaacgtttagataaacaatctattgaagcctttaataagaaatcaagcaagcgtattgctcaagcctttacatggggtaaaattgtcacagactacgagaaagtatttaaaggatagaaatgcagaaaattttatatcttcacgctggtgccgaaatgtatggtgctgacaaggttttgttggagcttattaaaggtttggataaagaagcctttgaggctcatgtcatcttgcccaacgatggcgtcttagtgggtgcattggaaaaggttggtgctaaggtaaaagtaattgattatccaatcttgcgccgtaagtattttaatcctaagggaatccttgagtattttggctcttataatcgttattcaaagcaaattgctaaatatgctaaggaaaatggcattactctcattcacaacaatacgactgcggtacttgaagggatttatctcaaacgtaagttgaaacttcctttgatttggcatgtgcacgagattatcgtcaaaccaaaagcaatctcagatttcatcaactttttgatgggacgttatgctgatacgatagtgacagtttcaaatgctgtggccaaccacgtgaagcagtctcgttttgtaaaaaatgaccaagttcaggtcatctataatggtgttgacaatggcgcctatcatgaaatggatgccagcgcagttcgtgaccagtttggtatcgcacaggatgccttggttatcggaatggttggtcgagtgaatgcatggaaagggcaaggcgactttttagaagctgtgactccaattttgaaggctaatctaaaagcagtagcttttctggcagggagtgcttttgaaggtgaagagtggcgtgttgatgagttggaaaaggcaatatcagactcaccagtggccggacaaatcaagcgtatcgattattataatcagacaacagagctctataatatgtttgatatctttgtcttgccaagcaccaatccagatcctctaccaactgtagttctcgaatcaatggcttgtggtaaacctgtagtgggttaccgtcatggcggtgtctgtgaaatggtgaaggaaggtaaaaacggctttctcaccacaccaaatcaacctgtagaattgtctaatgctattcaagaattggctaacaataccgagaagagagagcaatttggtgagtcctctgtccaacgtcaaaaagaactcttctcattacagagttatattcagaatttctcagagatatataagaaatacaatactaagatgaatactgaataaattaagaataaaataagaataaaataagaataaattaaaaccaatcgtatatccaattattaattttattcctagacgaagactcaagaataaaaattttacagtcatttgtgataattgttgggctggaaaagtttatcaagaattgggcttgccttatcaaacaccatttgtagggatgtttgtcttttctcctgataacatcaagatgctcgagaatttaaaatactatttgagtggaaatatctccttgaaatttgttaagaaatcaaaatatatcaaggactttgataaagcttatcctttagcgcttcttgatgatattgaacttcatttcttgcattatgtagaccaggaaaaattaactcaaaaatggaaccgtcgtttagaaagaattcattggtataatttgtatttcaagttcaatgataatgatgcttgtaattataaattgataaaggagtttgaaaaacttccttacaagagtaagattatcttctcttcaaagaattacagtgatttaccttctctagttcatttcaaatcagctgaaaagcaaggacacgttggcatcgacttgaaaacgtatcatcgctattttaatgttgtaacttggttgaataaaggaggagaagatttaacatagactatacattaggtaatataattatgaaaccacttttaactgtcgttattccagtttataatgtcgaaaaatatttgaaacgttgtcttgaaagtatactgtctcaagagtggaaatgttatgacattctacttattgatgacggaagcactgacaattctcctcaaatttgtgataattatgttaaggaatatgactttatctcagttatccacaaagaaaatagtgggctttctgaagctcgtaatactggtattttacatgctaaaggggagtatgtttattttcctgattcagatgactggattgaaccacaaacctttgtagaattagcagaagagttggagtctcgagaatttgatatcatttctttcaaccgtgagtttgtaaaaagtgaagaagaaattattttatctgagcccaaaacagatcaagtgtataaaggtaaagaggcttttgtgaaaatgttgacgcatagtcacatcactggttttgccaacgacaaaatatataagaaatctctttttattgagaataatatcctatttcccaaagggaaatattatgaagatttgggaacaaattataagctttttctcttagctaatagagtttatgcgacaaatcaaaaatattaccactacctaattgataaccctgattccattacacaatcatggaatgagaaaaagtttagagatatgtttgaattttataaagaagttttttattcggatttagttcgttcgcaaataaatcaagaagaatttcaaatttcaaaactttattatgtaaatggattaacccatattttagctagtttgtataaatctaaattggataagaaatatttagaactcactaatgaagtgaaacttgaattactaaaaaatagagtctttatttctcaaatgaaagatcaaccaaataagttaaaatatatactgtttagacttaaagtgttaaaatttgcattcagtattcaaaacattttctgatatgatgtaggagtttagtttgaaatactcagttgttattccagtttataatgttgagaaatatatagatcgttgtttacaaagtgttatttttcagaattatgaggacttggagattatagtgatcgagaatggatctacagataatagtcctcatatttgtgatacttatgctaacaagtatcctaatatctcagtctatcacattgaaaaccacggtgttggttttgcccgtaattttggattatcaaaagcaagaggagaattcatatattttgttgatgcggatgattatttaattggtaatctattctctgattttgaagagaagcttcatgataaggttgatttgctggtgtttagttattataattcaatagaaaaagatcttattgaattgaagagaaatcccaaaattttaccgaataatgtcttgttagataaaactaattttataacttcttttaaagaattagttttaacagatatgatgtatacagtatggaataagatttaccgaagagattttctaatagacaataatttgtattttttaaagtatgaactaggtgaggatgtacgatttaacctgagggtatacgattttgttgaaaatattttactgtccacagagtgttactatgtgtacatatcaggtagaatgaattctgcaatggggagttacaattcaaatcgagttacataccagttagaggagttatcacagattgaatacttattaaacaaatggaatatttttgataagtcatttatcgatacattaaaatcaagaattttaatgagtaacatacagaacatagtgctacaaaatatgtctatagagactcagaaaaaaaagattggcaagttatgtagaattgacgatataaattctctaataaatagttctccttctaaattacacattcttatacgtatttttttgaaaagtaaactatatatcattgtaatttttttgaaaagaatacagaattttgtcgataagaaaagatgatacgtatagaaatgtttgttagagtattcaatttattaaaaacatggaaaggtttggaaagtataagtgaatagtactcgctttatatcagagaagatttatctattaactttatttgtatggattatagtttcttcattaattactactacatattttgttagattagatggagcattgttgatttatcgcttatctctatacgctactattgctataattcttataaaagaattatttaatctttcgaatacgatgaattattttagatttcatttaaaacaaatgattctattcatattattcatattatctatgctaatcgtatctaaaaatagagatggtttactggatattacagttattttactggttgcttcagctagagatattgattttaagaagttattaaaaactttctcatatgcatctttttcagtattagcgataacgattttttctagtaattctgggattatttctaatatgtatatgaatgctaatggaggatatcgctatagtttaggttttaattatgtatcttttgcttctcagcgtacgttttttgcaatatgtagttatctgatgtataaaggaagaaaaatatcatatcttgagctattttcttttttgatactcactatttatatgttccaacagacagggacaaccagtcctttttatttgagtcttctcataatactttatacctgttttagtaataagatttttaagaaagattttatcattgataatggctggttgactaagatagtaaatcattgtttttcttttgcgttaacgataatactatatttttgcttctattcatcaggtatgttgtaccatttgaccgacaaattcacccataatcgtcttagattaagtgtagaaggatttcataattttggggtttcaatttttgggagaccgataacatttacaacatttgatatttttgggaacttttctagtaattataattttattgatagttcatttgtccagctccttgttattgatggtttattagttactctatttatgttaccagctttgacaggagtagtatcctatttcaaattaaaaagaagagatactgtactagcttgtataggaattatgacaatacatggtatgtttgatcctcagatgttagtacttcgttactcacctcttattctattgattagtcgactatttatcatgaacgatgagagaaatattgagtaaataaaaacggaatatagaagggttgagaaaatctagtcaattatgaaagttttaaaaaattatgcttataatctttcttatcagttattactcataatactacctatcatcacaactccatacgttacgagagtattttcttcaaatgatttaggaacctatagtttttttaactccatagttacttattttcttttgttagctactttaggagtagccaattatggtacaaaggagatttctggtgatcgaaaaatcattcgtaagaatttttggggaatttatactttacagctaggagcagctatttgttcttttgtactgtatgttttgttatgtctgattttacctgctatgaaaaatcctgtggcctatattctaggttttagtttgctttctaaagctctagatatttcttggttatttcaaggtttagaggattttcgaaagattacagtaagaaatattacggtgaaattagccggtgttatttctatctttctattcataagatcagcaaacgacctatatttatatgttttttttctgacaacttttgaattgttgggacaattaagtatgtggataccagcaagagagtttattggtaaaccatactttgatttgatgtatgctaaaaggcacttgaagccagtcatcttattgttcttacctcagattgctatatcgctttatgtaacattagatagcactatgcttggagctcttgcttcaacaagagatgtaggtatttatgaccaagctttgaaacttattaatattttattaactctagtaacttcattgggtagtgttatgttaccgcgagtttcaaatctattatcatcaggagatcataaagcagttaacaagatgcatgagatgtcatttctgatttataatttggtaattttccctattatagcagggatgttaatcgtaaatgatgattttgtaaattttttcctggggcaagatttccaagaagcacgttatgcgatagcaattatgatttttagaatgttctttattggttggaccaatattatgggtattcaaatcttaatacctcataataagaataaagagtttatgctgtcaacaacaattcctgcaattgttagtgtgggattaaatcttctcttgcttcccaagttgggctatataggtgctgcaattgtgtctgtcttaacagaggtactagtatggctgatacagttattctatactcgttcttatttgagagaggtgcctattctaggtgcattgattaaaattataatctcatctggagttatgtatggtattttgttatttataaaacaattcctcaatgtatcaccaatgattaatgtgggactatatgctgttctaggggcaataatttatgccagcttgatcttaatcttaaaggtcataaatccaaatgagttaaaacaacaattactaaaaaaataaaggggtgtattatgtacgactacttaatcgttggtgctggtttgtctggagcaattttttcttatgaagcaaccaagcgtggaaaaaaagtaaaagttattgataaacgtgaccacattggtgggaatatctactgtgagaatgtagaaggggttaatgttcataaatatggtgcacatatcttccatacttctaataagaaagtctgggattatgttaatcaatttgctgaatttaacaactatatcaactcgcctgtagctaattataagggtagcctttataatctacctttcaatatgaatactttctatgctatgtgggggacaaaaactcctcaagaagtgaaaaataagattgctgagcaaacggctcatatgaaggacgttgaacctaaaaacttggaagagcaagctattaagttgatcggtctagatatttatgaaaaattgattaaaggatatactgaaaagcaatggggacgttctgcgactgaccttccaccgtttatcattaaacgtttaccagttcgtttaacctttgataataattattttaacgaccgttatcaagggattccaattggagggtacaacgttattatcgaaaatatgctgaaggatgtggaagtagaacttggagttgacttttttgccaatcgtcaagaattagaagcttctgctgaaaaagttgtctttacagggatgattgaccaatactttgattataaacatggtgagttagaataccgtagtcttcgttttgagcatgaagttctagatgaagaaaactatcaaggaaacgcagttgtaaactatacagaacgagaaattccttatactcgtattattgagcataaacattttgagtacggcacacaagataaaacggtcattactcgtgagtacccagcagattggaaacgaggagatgaaccttattatccaatcaatgatgagagaaacaatgctatgtttgctaagtatcaagaagaagcaacacagaatgataaggtgattttctgcggacgtttagcagactacaaatactacgacatgcatgtggtcattgaacgtgccctacatgttgtagaggaagagtttaacaaagataatgaaggataaaattgatattgttgttttatgggtagatgggaatgatcctaactttattaaggaaaaacaaagagtaactagtcaaaaggaatcgttaaatgcagacgctgatggtgaacagcgttatcgagaatatggaatttttcagtattggtttcgtatgattgagagacatgcaccgtgggtcaataatatttatttaattacgaatggtcaaaagccgagctggctgaaccttagtcatccaaagttgagatttatatcacataaggaatttattccagaatcctatcttccaacttttaattcagcgactattgagttaaatcttcatagaattgaaggcttgtctgaaaattttatttattttaacgatgacatgtatttgataaaagatgtaaagccttcagatttctttaaaaataataaaccgaggcttttagcagtttacgatgctttagttccatggtcctcgtatacaaacacttatcataataacgttgaattgatttatcgtcatttccccaaaaagcaagccttaaagtcttcgccttggaaattttttaattatagatatggtgctttaatattgaagaatatcttattacttccatggggccctacggggtatgtaaatcaacatcttccagttccaatgaaaaagagtactttagctcatctttggaaaatcgagtcggaggtattggatagaacgtcacggaatcaattcagaaattatggggtggatgtgaatcagtatatttgtcagcactggcaaattgaaagtaatgagttttatccaatttcaaaaaatatgggtgaatcaattgagctaaatcaaattgataagctgaagaagatttttggaaataagaagcgaaaactactatgtgtgaatgatagtattaatattgatgaaagaaatattatacttttcaaaaaattattagaagaacgctatccagaaaagtcatcttttgaaaaatgaaaggtaaaatatgaaatactacttaaaagaagaatttttaaatgatgttaaccaaaaaaatgctggcaataaggcacgtaatgatgttgaaactgtgttaaatgagttgggatatatccctttaagagtattggttgatgattggtataaaatgaatgtactcaaggcacagatacataaatttcaagcactatcaaaagcattcaaacttttaaaaagaggcgatgagattgttatccaatttccattattacaccattccttactatttagtaatttactaaaatcccttagaaaaaaaggtattaaaatctatttcctgattcatgatttagaaacattacgttttgtaaatgatgaaacattaccttttagaatgaaattacgtatgaaaattacggagggatcttctttacattatgtaaatggtattattgctcataataaagtaatgaaaggagtattagtcaataaaggagttcttggagaaaaaattactaatttagaaatctttgattatttaattccagattttatagaaaaaactagtttaagaaaagaacaaccaataattgttgcaggaaatttatcacaagataaagcagcatatctatactcattacctatagaaccacaatttaatttatatggtgttggatttgatgagtctaggaagttatctaatgaaacctactttggttcatttcttccagatgaacttccatcagtattggaaggaagttttggtttagtttgggatggtgacagttctgagacttgtagtggattttttggagagtatctacgctataacaattctcataaagcgtcactttatttggcttctggtttccctatcattgtttggaaggaatctgctttgtctcattttgtcttaaagaataattgtggtatcacagttgattctttgtttgacatacaagaaacaatcaataatatttcggaagaagaatatcaagagttagtagaaaatgcacaaaaggtaggaaataatataagatcaggatattatttgaaaatagctttagagaaactaactaaatacttagtttaaattcactaagtaatgtatcatttgtctctgattactaattagaaaaattctaatttaatatagaaaggtagttcgattatgaaaggtattatccttgcaggaggttcaggaactcgcttgtatcctttgactcgtgctatatccaaacaactgatgccggtttatgataaacccatgatttattatcctctatcgacactcatgttagctggtatcaaagatattttaattatctctactcctcatgatttacctcgttttaaagagctgcttcaagatggttcggagttgggaattaatctttcttatgcggaacaacctagtccagatggtttggcccaggccttcattatcggtgaaaaatttattggaaatgacagtgtcgccctaattttaggagataatatttactatggtcctggtctatctaaaatgcttcagaaggctgctaataaggagaaaggtgcaactgtttttggatatcaagttaaggatcctgaaagatttggtgttgtggaatttgatgaagagatgaatgctgtttctattgaggaaaaaccagaacatcctcgttccaattatgcagtgaccggcctttatttctatgataatgatgttgtagaaatttcaaaaaatattaaaccaagccctcgtggtgaattggaaattacagacgtaaacaaagcatatctagaacgtggagacttatcagttgagctaatggggcgtggttttgcgtggttagatactggaactcatgaaagtttattagaggcgtcacagtacattgagacagtgcaacggatgcaaaatgttcaagtggcaaacttagaagagattgcttatcgtatgggttatatcagccgtgaggatgtattaaagttggcgcaacctcttaagaaaaatgaatacggacaatatttgctccgtttgattggagaagcatagatgacagataattttttcggtaagacgcttgcggttcgtaaggtcgaagctattccaggtatgctggagttcgatattcccgttcatggagataatcgtggttggttcaaagaaaatttccaaaaggaaaaaatgctcccccttggtttcccagagtatttctttacagaaggaaaattacaaaacaatgtatccttctcacgtaaaaatgttctccgtggtctacacgcagaaccttgggataagtacatctctgtagcagatggtgggaaggttctgggttcttgggttgatctacgcgagggcgaaactttcggaaatacttatcaaacagtaattgatgcaagtaagggaatctttgttccccgtggtgtggctaatggatttcaggttctatcagatacagtctcttatagctatctggtcaacgattattgggcattagatttgaaacctaaatatgcctttgtcaattatgcagatccagaattaggaattgagtgggccaatcttgctgaagcagaggtttcagaagcagataaaaatcatccactacttaaggatgtaaaacctttgaaaaaagaagatttgtaaaaaaggaaagactatgactgaatacaaaaaaattatcgtgacaggtggagcaggttttatcggttctaactttgttcattatgtttacaagaactttccagatgttcacgtgacagtattagacaagttgacttatgctggaaatcgcgctaatattgaggaaattttgggagatcgtgttgagttagttgttggtgatattgctgatgcggagttggtagacaagttggctgctcaagcagacgctatcgttcattatgcagcggaaagtcacaatgataattcactgaatgacccatcaccgtttatacatactaacttcatcggaacctatactcttttggaagcagctcgcaaatatgatattcgcttccaccatgtatcgacagatgaagtttatggtgatcttcctcttcgtgaggatttgccaggaaatggtgaaggtccaggtgagaaatttactgctgataccaaatacaatcctagctctccatactcatcaaccaaggccgcttcagacttgattgtaaaagcctgggtacgatcatttggtgtcaaggcaacgatttctaactgttcaaataactacggtccttatcaacacattgaaaaattcatcccacgtcagattaccaacatcctaagtggaattaagccaaaactttatggtgaaggtaagaatgttcgtgactggattcataccaatgatcattcttcgggagtttggacaatcttgacaaaaggtcaaatcggtgaaacttacttaatcggggctgatggtgagaagaacaacaaggaagttttggaacttatccttaaggaaatgggccaagatgcagatgcctatgatcatgtaactgaccgtgcaggacatgacctccgctatgcaattgacgctagtaagctccgtgatgaattaggctggaaaccagaattcactaattttgaatctggtctcaaggaaacaatcaagtggtatacagataaccaagaatggtggaaagcagagaaagaagctgttgaagccaattatgctaaaactcaggagattatcaaattataaaaagcaggaaatagttgctttttattgctatagtgggaagagttacagattaggaaggtgtagagatgattttaattacaggagcaaaaggccaattaggaactgaacttcgttatttattagatgagcgtaatgaagaatacgtagcagtagatgtggctgagatggatattacaaatgaagaaatggttgagaaagttttcgaagaagttaaaccgactttagtataccactgtgctgcctacaccgctgttgatgcagcagaggatgaagggaaagaattagactttgctatcaatgttacggggacagaaaatgtcgcaaaagcatctgaaaagcatggtgcaaccctagtttatatttccaccgactatgtctttgacggtaagaaaccagttggagaagagtgggaagttgatgatcgaccagatccacagacagaatatggacgtacaaagcgcatgggagaagagttagttgagaagtatgtgtctaatttctatattatccgtactgcctgggtatttggaaattacggtaaaaactttgtttttacgatgcaaaaccttgcgaaaactcataagacattaacggttgtaaatgaccagcatggtcgcccaacttggactcgtaccttggctgaatttatgacttatctagctgaaaattgcaaggaatttggttactatcatttatcgaatgacgcaacagaagacacaacttggtatgattttgcagttgaaattttgaaagatacagatgtggaaatcaagccagtagattcaagtcaatttccagcaaaagctaaacgtccgttaaactcaacaatgagtctggctaaagctaaagctactggatttgttattccaacttggcaagatgccttgaaagaattttataaacaagaagtaaaaagtgatattaactaatttgaatcctggtcgttaatgaactccccacgaaaataatagatataatattctcatgacaacagctttgcagtgtgtaagaaatgagttagattaaagaattaaaactgtttctcagatgctattttcaaatatgattaataattccttgactacctaatgtagttgaggtatttttgatattattcatatttttgcaaatctattgtttaaaaaataattttctaaaattctgaaaattctgttgacaggactttaaaaagggtctataatggatagaaaaacaaaggagaatactatgaaaacaaggaaagtattggctcttgcgggagtcactttattagcagctggtgtcttagcggcttgttctggtggttctgctactaaaggtgagcagacttttgcatttacctacgagacagacccagataatctcaactatttgacaaccagcaaggcagctacttcaaacattactagtaacgtcattgatggattgtttgaaaatgaccgttatgggaatcttgttccctctatggcagaggactggtcagtttctaaagatggtttgacctacacttataagattcgtcaggatgccaagtggtacacatctgaaggggaagaatatgctcctgtcaaggctcaagactttgtaacaggtcttaaatatgcaacagataagaaatcacaagctctttacttggtacaggattcaatcaaggggctggatgcttatgctaagggagaaaataaagatttttctcaagttggaattaaagcccttgacgatcaaacagtccaatacactttgaacaaacctgaaagtttttggaattctaaaacaacaatgggtgtcttggcaccagttaatgaagagtttttgaactcaaaaggggatgattttgctaaagcgacagatccaagcagtatcttgtataatggtccttatttgttaaaatctcttgtggctaaatcttccgttgaatttgcaaaaaaccctaactactgggataaagataatgttcatgttgataagataaaattgtcattctgggatggtcaagataccagcaaacctgcggaaaactttaaagatggtagtcttacagcagccagactttatcctacaaatgcaagttttgcagaacttgaaaaaacgatgaaggacaatattgtctatacccaacaagactctacgacttatctagttggtacaaatattgaccgccagtcctataaatatacttctaagactagtgacgaacaaaagacttctactaaaaaggctctcttaaacaaggatttccgccaagctattgcttttggtttggatcgtactgcctatgcttcacaagtgaacggtgccagtggtgcaagcaaaattttgcgtaatctctttgtgccaccaacatttgttcaagctgatgggaaaaactttggcgatatggtcaaagaaaaattggtgacttacggggatgaatggaaggatgttaatctggccgatgcccaagatggattatataatcctgaaaaagccaaggcagaatttgccaaagctaagtccgctctacaagctgagggagtacaattcccaattcacctagatatgccagttgaccagacagcaactacaaaagttcaacgtgtacagtctttcaaacaatcggttgaagaaaccttgggtacagataatgtcgtaattgatattcaacaactacaaaaagatgaagtcttgaatattacctactttgctgaaacagcagctggggaagattgggatatttcagataatgttggttggtctccagactttgcggatccatctacttacctcgatattatcaaaccatcagttggtgaaaacactaaaacctactttggctttgattctggtacagataatgctgcagctaagaaggttggtctgaacgactatgagaaattggtaactgaagctggaaatgagacaatagatgtagcaaaacgttatgataagtatgctgcagcccaagcttggttgacagatagtgccttgattattccaacaacatcactcactggtcgcccaatcttgtctaagatggtaccatttacgatgccgtttgccttctctggtaacaaggggacaagcgatccgctcctatacaaatacttggaacttcaagacaaggcagtcacagcagatgaatatcaaaaagctcaagataaatggatgaaagaaaaagaagaattcaataaaaaagcgcaagaagaacttgcaaaacatgtgaaataagataaaaagaagttagttgttagctaacttcttttggttttgagaaaatagattgatgcctatcctcatgttttagatgtcaatgagtctattgaattgtagaaaaaatcctgagttttgcttctcaggattttctttcatctcactgttgtggttgttgaacttgtggattttgtggtgctggttgtactggctgcgttggctgaacagcttgaccagcttgtccttgattaggatcagttgctggagcattatttggttgttgaccaaccgttgtacttgcctgtgtagttgaactttcagcggttgtgcttggagtttctactgtttgtgtttgttgtgtagctggattattccaggcgttcttcgcgttgttttggaagacgaattctccatttcgatacaagccatctggcattgtccagtctccaggatggtcatcttcagaaaggtaagttatcattgaacggtagaccttaccagccacaaggaaaccatctccgatgattggagttagacgatttgagtatcctgtccaaacagccattgcatatttacgagtataccctacaaacatttcatctggggctacgtagccagtgttcttgatatacttttcaatttcgtcgtcagtatagttagaagtacctgtcttacctgcttgtggaagccatggtaggtaggctccacgtccggtaccgtatactaggactgttttcatcatttcagtcatcatataggcagtagtttctttcatagctcgtgtgccggcatcagaaaattctttctcactaccgtcgctaaagacgattttattgatgtacattggcttgtggtaaataccaccattagcaaaagcagcgtaggcagcagccattttttcactacttgcaccgtattttttgttggattcagttgtattacttgaaatggcgtttgcataatgcatgcttggataatcaataccaagcccattaaggaaggctttagccttatctagaccgaccttattcaaagtttcaacggctgtgacattacgtgattgttgaagagcatattggacagtaatgtttccaaagtagccatgatcccagttgtagactggagtatcagtaccaggatagttataaggaacatcatgaacaatatatgcagtagagtcatagactccatattctaaagcgggagcatagtcagtgattggtttcatagtagaaccccagtcacggttggtttcaacggcttggttaacaccgaaagatacattacttgattggtgacgggcacctagttgagcaatgactttaccatttgttacatctacgatggttgaagctacttggagttcatcatctggataggcaacatattcatctgtgttgtaaacatcccaaagtcgctgttgaacatctttgtccacatttgtgtagacatccatacctgtagtcagaaggttgtaaccagtttcttgttcaacttggtcaatgacttctttgaggtagttatccatataggctgggtaactattggctgattttaagctctgaagaccgtcagtgataggcgtattgattgctttctcatactgttctgcactgatgtaattttgtcccttcatttctgaaagtaccaagttacgacgctcgagagcagcttctggatgggaatatggatcatattggtttggtgcctgaggcattccagctaggagcgctaactgtggcaagcttaaatccttcaagtctttttcatagtaattttgggctgcggtttgcattccatagttaccgttagacatgtagactttgttgatgtagtaggttaggatttcttgcttagttgctttttgttctagttgaacggccagccaagcttcttgggctttacgtgacaaggtttgatcagcagttgaagttgagaaataagttaatttaatcaattgctgggtcaaggttgatgccccttggagtcctccttttccttggaggtttcgcaatgctgcacccatgatacgaatggtatcgacacctctatgatcaaagaaacggtggtcttcgatagacacaattgccttgactaagtcagtaggaatttcatttgcttgagcatttacgcgacgttcagatccaaggtcagcaatcagttcgttcttattgtcataaatcttgctagaagttgtcgcgattagtttactttcagataaggctggagccttgctaacaaagtagaggaagacaccaccacctaatagaaataaagcgataaataaggtaaggaatgtaattcccatatactttaaaaatcgcagaataatttgtttattcatcttgttttaccacctagtaaatgttctttgataatatcgagatagggtatttgagggaaggctccttgctttactaaatatccgtattcttgaatatatccaagtggcattgatttctgccccttatcttgatgataaaagcgaattaaatcaagtgccggcaacaaataagtttcttgttgagaagaaaaatgaagcagtacgaagcaaatgccctgctgttctagaacttgttccatatgttgaatctggtgaagatggaagttcttcattgggatagcatttttttgccgcgtttctttagcttcaaagtcaatgtaatatcctctatacaccccagaataatctgttgtggaagcttgtctaaaataggcttctacaattttggctcgactacgttgaggatagtctactcgaacaatttgaacaggcgtcggctttttatggataactgccatgccatgcgtcagatagtagtcgttggtagcgttgatcatcttttcaaaagtcattcctcgatttgcgaaattttttggttgagaaatggatgtttggcttttttttgatgaaattttatgaggatagttgaccatatttctccttattggtacaataacatcactctattataccataaaaatataaagaaaggtgtaaaaatgaccacagctttaattatgggctattctaattttgacttgggtgtctttaatgaaaaagatatcaggttaaaaattataaagaaagccattcgccgtgatttagaaagtttagcagaagaagggattaaatggctggtatttacagggaacttgggattcgaatcctgggttctggatgtcgcaaatgaaatgaaagaagaatatgatttcagcctagcgacgatttttgattttgaaacgcacggggacaattggaatgcagcgaatcagcttaaacttagccaatttaagcaagtagattttgttaaatatgcctatcccaaatatgaacatacagggcaactgcgtgattaccaacgatttttattggaaaatactgatttagcttattttttctatgacccagaaaatgagaccaaattaaaatttatggataacttgatgaaaaatcaggaaggttatcgcataaaaaggctaacgtttgaagacttaaatgagctagcagaaaatttttctgaaaagtaagcctttgaccttgatttttgtttgcctttttttatataataatactattagaaaccgagaatggagagagagatggcaagtattattttttcagcaaaagatatttttgagcaagagtttggacgtgaagtccgtggatatagtaaggttgaagttgatgaatttttggacgatgtcatcaaggactacgaaacttatgctgccttagtcaagtctctccgtcaagaaattgcagagttgaaggaagaattgtctcgcaaccctgaatctgcaccggttcaagcagaaccacttgaaatgacagcaacaacttctatgacgaattttgacattttgaaacgtctaaatcgtcttgagaaagaagtgtttggcaaacaaattttagataactctgatttgtaagagattatttgaaaagtgcaatttttggataatcgcgtgaggagaatttcttttcatgaggaaagtccatgctagcacaggctgtgatgcctgtagtgtttgtgctaggcgaaaccataagcctagggacgagagatcgttacggcagttgaaatggctaagtcttcggataggtcagagtaggcttgaaagtgccacagtgacggagtctttctggaaacggagagagtggaacgcggtaaacccctcaagctagcaacccaaatttcggtcggggcatggagtgcacggaaacgaacgtagtactctgactgctatcagctataggctgttagtggtagacagatgattatcaaaggaagtggtcctagtcacttctggaacaaaacatggcttatagaaaattgcatataggttggggctgagaaattttctcaacctcattttttaaagtggacatatagaaaggtcttataagactgaaaatgaaaaaagaatttaatttaatcgcgactgctgcagcgggtcttgaggctgtcgttggtcgtgaagtacgagagttgggctacgattgtcaggttgaaaatggccgtgttcgttttcaaggagacgcgagagccatcatcgaaaccaacctctggcttcgtgcagcagaccgtattaagattatcgttggatctttccctgctaagacttttgaggagctgtttcagggagtttttgctctagattgggaaaattatttaccgcttggggctcgttttccgatttcaaaagccaaatgtgttaaatctaaacttcacaatgagccaagtgttcaggctatttctaagaaagctgttgttaagaagttgcagaaacactatgcccgtccagaaggggttcctctgatggaaactggtcctgagtttaagattgaggtctctattctgaaagacatagcaactgtcatgattgatacgacagggtctagcctctttaaacgtggttatcgtaccgaaaaagggggagctcctatcaaggaaaacatggcggcagccattttgcaactctctaactggtatccagataagcccttgattgatccgacctgtggttcaggaactttctgtatcgaggcagttatgattgctaggaagatggctcctggtcttcgtcgctcctttgcctttgaggaatgggattggattagtgatcgcttgatccaagaagttcgcacagaagcagctaagaaagtggatcgtgagttggaactggatatcatgggatgtgacatcgatgcacgtatggtggaaattgctaaggccaatgctcaatcagcaggtgttgcaggagatgttacatttaagcagatgcgcgtgcaggatttgcgttctgataaaataaatggagtgattatctctaacccaccttatggtgaacgcttgtcagatgatgcaggagttaccaagctttatgctgaaatgggtcaagtatttgcaccgctgaaaacgtggagcaagtttatcttaaccagtgatgaagcctttgagaccaagtacggtagtcaggcggataagaaacgtaagttgtataatggaactttaaaagttgatttgtatcaatattttggtcagcgtgtgaaacgacaagaagtaaagtagaaaggaaaaactcatgagtaagaaaagacggaatcgtcataaaacagaacataaagaagcgcaatttgattttgatgatgctaaagagctaacggttggagaagccatgcgaaaaaatgaagaggtggaagcaggtgtgttgcctggagattctatcttggacaagtatgtgaaacaacataaagatgaaattgaggcagataagtttgaaacacgtcagtttagcaaggatgatttagttgaaaaagaagaggtagaggagactcagactctggataatttgcttcaagagcttcgtgaggaaacaggagtaacttctccagctccagaagatgaattgaatcagtttgatgatttagaattaacacgagtttcagaagctcctcttgtcgaagaatttgagaaggaagaggtaccattagttggaacggaagaggctctcacacgttctcgagtcacagatagtgaagatggaaaaagtaagaagaaatgggtgctttacggtattctagcagccttagtggttcttatccttggaactggttattatgtttatcgtcaagtggctcgttcaaccaaggaaatccaaacttctcaatcaactacaaacacgcagccagatgtggaagaattcaataatttatatgatgccttctatacagatagcaacaaaacggctttaaaaaatagccagtttgataaactgagtcaactgaaaaccttgcttgataagttagaaggtagtcgtgaatatacgcttgcaaaatctaagtatgatagcctagcaactcaaatcaaggccattcaagatgtcaatgctcaatttgagaagccagctattgtggatggtgtcttggatactaacgctaaagctaaatcggatgctaaatttacagatattaaaactggaaatacggagcttgataaagttctagataaggctatcagtcttggtaagagccagcaaacaagtgcttcaagctcaagttcaagtgaaactagcagctcaagctctagtcaagcaagcgaaaatactgctagtgagacaagcccaagtagttcaaatactgcctcaactgaaacgagaagtacccgcagtgaagtcaatatgggtgtatcaagtgcaggagttgctgttcaaagaagtgcgagtcgtgtttcttataaccagtctgctattgatgatagcaataattctgcctgggatttcgcggatggtgtcttagaacaaattctagcgacttcacgttcacgtggttatatcactggtaaccaatatatccttgagcgtgttaatatcgttaatggcaatggttattacaacctctacaaaccagatggaacctatctctttacccttaactgtaagacaggatactttgttggaaatggttctggacatgcggatgacttggactactaagcagtcgttacaaaattctttcttttcaaaagtaaaaatgataaaataaaacaaattaaacaagaggagtgtcaaatgacaaaagctaactttggtgttgttggtatggccgtaatgggtcgtaaccttgcccttaatattgaatctcgtggttacacagttgctatttacaaccgtagtaaagaaaaaactgaagatgtaattgcttgccatcctgaaaagaactttgtaccaagctatgacgttgaaagttttgtaaactcaatcgaaaaacctcgtcgtatcatgctcatggttcaagctggacctggtacagatgctacaattcaagcccttcttccacaccttgacaaaggtgatatcttgatcgacggaggaaacactttctacaaagataccatccgtcgtaatgaagaattggcaaactcaggtatcaactttatcggtactggagtttctggtggtgaaaaaggtgctcttgaaggtccttctatcatgcctggtggacaaaaagaagcatacgaattggttgcggatgttcttgaagaaatctcagctaaagcaccagaagatggcaaaccatgtgtgacttacatcggtcctgatggagctggtcactatgtgaagatggtccacaacggtatcgagtatggtgacatgcaattgatcgcagaaagctatgacttgatgcaacacttgctaggcctttctgcagaagatatggctgaaatctttactgagtggaacaagggtgaattggacagctacttaatcgaaatcacagctgatatcttgagccgtaaagacgatgaaggtcaagctggaccaatcgtagactacatccttgatgctgcaggtaacaagggaactggtaaatggactagccaatcatcacttgaccttggtgtgccattgtcactcatcactgagtcagtatttgcacgttacatttcaacttacaaagaagaacgtgtgcatgcaagcaaggttcttccaaaaccagctgccttcaactttgaaggagacaaggctgagttgattgaaaagatccgtcaagccctttacttctcaaaaatcatttcatacgcacaaggttttgcgcaattgcgtgtagcttctaaagaaaacaactggaacttgccatttgcagatatcgcatctatctggcgtgatggctgtatcatccgttctcgtttcttgcaaaagattacagatgcttacaaccgtgatgcagaccttgctaaccttcttttagatgaatacttcttggatgtcactgctaagtaccaacaagcagtgcgtgatatcgtagctcttgctgttcaagctggtgtaccagtaccaaccttctcagcagctattacttactttgatagctaccgttcagctgaccttccagctaacttgatccaagcgcaacgtgactactttggtgcccacacttaccaacgtaaagacaaagaaggaacattccactactcttggtatgatgaaaaataagtaggtctgccatggggaaacggattttattacttgagaaagaacgaaatctagctcattttttaagtttggaactccaaaaagagcaataccgagttgatcaggttgaggaggggcaaaaagccctcttcatggctcttcagacagactatgacttgattttattgaatgctcgtctgggggatatgacagcccaggattttgcagataagctgagtcgtactaagccagcctcagtcatcatggtcttggaccatcgtgaagaattgcaagatcagattgaggcaatccaacgctttgccgtttcttacatctataagccggttattattgacaatttggtggcccgtatttcagcgattttccgaggtcgggactttatcgaccaacactgtagtcagatgaaggttccaacgtcttatcgcaatctgcgtatggatgtagaacatcataccgtttatcgtggcgaagagatgattgctctgacccgtcgtgagtatgacctcttggctactcttatgggaagcaagaaagttctgactcgtgagcagttattggaaagtgtctggaagtatgaaagtgcgaccgaaacaaatatcgtggatgtctatatccgttatctacgtagcaagcttgatgtaaaaggtcaaaaaagctacattaaaaccgtgcgtggtgtcggttacaccatgcaagaatagaaaagcagttgcagttatgtaactgctttttttgaggggtgttctatatattgacatgcgattttgtatttgctacaatcagctatggaggataggtctaatgaaaataataaaaaaaattgatgcaaatcgcattagtattctttttctttggtttactggcaacaaaggcagtattggcggatgatgctgattcagaaggttggcaatttgtccaagaaaatggtagaacttactacaagaagggtgacatcaaagaaaaggcttggcgagtgattgatggcaagtactattattttgatcatgtatcaggagagatggttgttggctggcaatatatcccgtttccgtctaaaggtagtacaattggtccttacccaaatggtttaagattagaatttatgccaatgccaagatggtattactttaatcaagatggggtcctacaagaatttgttggcaagcaagttttagaggcaaaaactgctacaaataccaacaaacatcatggggaacaatatgatagtccagcagagaaacgagtctattattttgaagatcaacgtagttatcacaccttaaaaactggttggatttatgatgagggacactggtattatttacaaaaggatagtggctttgatgctcgtatcgacagtttgacggttggggagctagtgcgtggttggaccaatgataactcaacttggtactatctagatccaacaactgctacaatgcaaactggttgggaacaacttggcaataagtggtactacctccgctcatcaggagcaatggcaactggctggtatcaggaaggctcaacttggtactatttagatgctgaaaatggcgatatgaaaacaggctggcaatacctcggtaacaagtggtactatctccgttcatcaggagctatggcaactggttggttccaggtcaatggcaaatggcactatgcttatagctcaggtgctttggcagtgaatacgaccgtagatggctactacgtcaactacaatggcgaatgggttcaataatgaaagaggcgattgtgaaggaaacaatcgctttttttgtgaaaatataatagaatagataggagagaataaatacttgtaggaaaaaataatactcttcgaaaatcaaattcaaaccacgtcagcgtcgccttaccgtagctatggttactgacttcgtcagttctatccacaacctcaaaacagtgttttgagcaacctgcgggtagcttcatagtttgctttttgattttcattgagtatgagacggctttttcgtctagtaaaaggaaaatatgacaaaaaaagttggtgtcggtcaggcacatagtaagataattttaattggggagcatgcagtcgtttacggttatccggctatttccctgcctcttttggaggtggaggtgacttgtaaggtagttcctgcagcgagtccttggcgtctctatgaagaggataccttgtccatggcagtttatgcttctctggagtatttgaatatcaaagaagcctgcattcgttgtgagattgactcggctatccctgagaagcggggaatgggttcgtcagcggctatcagcatagcggccattcgtgcggtttttgactactatcaggcagaactgcctcatgatgtattagaaatcttggtcaatcgggctgagatgattgctcatatgaatcctagtggtttggatgctaagacctgtctcagtgaccagcctattcgatttattaagaatgtaggatttacagagcttgagatggatttatctgcctatttggtgattgctgatacgggtgtttatggccatactcgtgaagctattcaagtggttcaaaacaagggcaaggatgccctaccgtttttgcatgccttgggagaattgacccagcaggcagaagttgcgatttcacaaaaagatgctgaaggactgggacaaatccttagtcaagcgcatttacatctaaaagaaattggtgttagtagccctgaggcggattctctagttgaaacggctcttagccatggtgctctgggtgccaagatgagcggtggtgggctaggaggctgtatcatagccttggcaaccaatttgactcaagctcaagaactagcagaaagattagaagagaaaggagctgttcagacatggatagagagcctgtaacagtacgttcttacgcaaatattgctattatcaaatattggggaaagaaaaaagaaaaagagatggtgcctgctactagcagcatctctctgactttggaaaacatgtacacagagacggccctgttgcctctaccgacggatgcgactgctgatgtcttttacatcaatggtctgctacagagtgaggcggagcatgtcaagatgagcaagattattgaccgttaccgtccagctggtgagggctttgttcgaattgatactcaaaataatatgcctacggcagcgggcttgtcatcaagttctagtggtttgtctgccttggtcaaggcttgtaatgcttatttcaagcttggattgactcggagccagttggcacaggaggctaagtttgcctcaggctcttcctctcggagtttttatggaccactaggtgcttgggataaggatagcggagaaatttaccctgtagagacagacttgaaactagctatgattatgttggtactagaggacaagaaaaaaccaatctctagtcgtgatgggatgaaactttgtgtggagacatcgacgacctttgatgactgggtgtgtcagtctgagaaggattatcaggatatgctgctttatctcaaagagaatgactttgccaaggttggggaattaacggagaaaaatgccctggctatgcacgctacgaccaaaacagcatcaccagccttttcttatctgaccgatgcaagctatgaagccatggactttgtccgtcagcttcgcgagcaaggagaatcctgctactttaccatggatgcaggtcccaatgtcaaggtcctatgtcaagagaaagacttggagcatttatcagaaatcttcggtcagcgttaccgcttgattgtgtcaaaaacaaaggatttgagccaagatgattgctgttaaaacttgcggaaaactctattgggcaggtgaatatgctattctagaaccagggcagttggccttgataaaggctattcccatctatatgaggggagagattgctttttctactcactaccgtatctactcagatatgtttgatttcgcagtagatttgacaccaaatcctgactatagcttgattcaagaaacgattgctttagtggaagatttcctcgtttattgtgggcagactttgcaacctttttctttggaaatccgaggaaaaatggaaagagaagggaaaaagtttggtctaggttctagcggtagcgttgttgttttggtcatcaaggctctgttggctctgtataatctttcggttgatcaggatctcttgttcaagctggccagtgctgtcttgctcaagcgcggagacaatggttctatgggggacattgcctgtattgtggcagaggatttggttctctaccagtcatttgatcgccagcaggtagcaacttggttggaagaagaaaagttggcgacagttttggaacgtgattggggattttcaatttcacaagtgcaaccagccctagaatgtgatttcttagtgggatggaccaaggaagtggctgtatctagtgatatggttcaacaaatcaagcaaaatatcaatcagaattttttaagttcctcaaaagaaacggtggtttctttggtagaagccttggagcaggggaaagttgaaaaaattatcgagcaagtagaagtggccagtcaacttttagaaggcttgagcgtagatatttacacgccttcgcttagacagttgaaagaagccagtcaagatttgcaggctgttgccaagagtagtggcgctggtggtggtgattgtggtattgccttgagttttgatgagcaatcaactgaaaccctaaaaaatcgttgggccgatctggggattgagctcttataccaagaaaggataggacatgacgacaaatcgtaaggatgagcacatccgctatgcccttgagcagaaaagttcctataatagctttgatgaggtggagttgattcattcttccttgcctctttacgatctagatgaaatcgatctgtcgacagaatttgctggtcgaaagtgggactttcctttttatatcaatgctatgacgggtggaagcgataagggaagagaaatcaatcaaaaactagctcaggtggcggaagcctgtgaaattttgtttgtgacgggctcttatagcgcagccctcaaagatccagcagatgactctttttctgtcaagtatgatcatccaaatctccttcttggaaccaatattggattggataagccggttgaacttggtttgcagactgtgacggagatgaatcccttacttttacaagtgcacgtcaatgtcatgcaggaattactcatgcccgagggagaaaggaagtttagaagctggcaatcgcatctagcagactacagcaaacaaatccctgttcctattgtcctcaaggaagtgggctttggaatggatgccaagaccatcgagagagcctatgaattgggcgttcgaacctttgacctgtcaggtcgtggtggtaccagttttgcctatattgaaaatcgccgcagtgggcaacgtgattacctcaatcaatgggggcaatctaccatgcaggcccttatcaatgcccaagactggaaagacaaggctgaactcttagttagtggaggtgttcgcaatccgctggatatgattaagtgtttggtctttggtgctaaggctgtaggactctctcgaacagttctagaattggttgaaacctacacagttgaagaagtgattggcattgtccaaggctggaaagacgatctgcgtttgatcatgtgtgcccttaattgtgccaccatagcagatttgcaaaaagtagactatcttctttatggaaaattaaaagaagcaaagaatcagatgaaaaaggcgtaaccaccgcctttttttccatcctcagactgaggtgacttttttgaagtgtgataaaatagaagggagaggatgaacctatgagaaaatttaaaatctttttatttatcgaagcctgtcttttgacaggagctctgattttgatggtttcagagcatttttcgcgttttctgctgattttattcctctttttgcttttgattcgctattacactggtaaagagggcaataatcttcttttagtggtggcaaccattctcttctttttcatcgtcatgctcaatccttttgtgattttagctatttttgttgcggttatatacagcctctttcttctttatccgatgatgaaccaggaaaaagagcagaccaatttggtgtttgaagaggtggtaacggttaagaaggagaaaaatcgttggtttggcaatctccatcatttttcaagctaccagacttgccagtttgatgatatcaatctctttcgtctcatgggcaaggacaccattcatctggagagggtcattctaaccaatcatgacaatgtcattatccttagaaagatggtaggcacgaccaaaatcatcgtacctgtagatgtggaagtcagtctcagcgttaactgtctctatggggatttgacttttttcaaccagcccaagcgagccctccgtaatgaacactatcatcaagaaacaagagactatctcaagagtaacaagagtgtcaagattttcttgaccactatgattggcgatgttgaggtggttagaggatgaaaaaacaagcttatgtaatgattgctctcacctccatcttgtttgtcttgtttttctcccacagcttgctggaaatccttgactttgactggtctattttcttgcatgatgtcgaaaaaacagaaaaatttgtctttttgttgttggtattcagcatgtccatgacctttctcttagccctgttttggcgaggtgttgaagagctttctctaagaaaaatgcaggctaatctcaagcgtttgttggcagggcaagaagtagttcaggttgcagatccagatttggatgccagtttcaagtccttgtctggcaaacttaaccttttgacagaagcacttcaaaaggctgaaaatcacagccttgctcaggaagaggaaatcattgagaaggaaagaaagcggattgctcgggatttgcacgatacagtcagtcaggagttgtttgcggcccacatgattttatcgggtatcagtcagcaggctttgaaattggatagagaaaagatgcagatccagttgcagagtgtcacagctattttagaaacagcccagaaggacttgagagtcttgctcctgcacttgcgaccagttgaactggagcagaagagcttgatagaagggattcaaattctcctaaaagagcttgaagacaagagtgatcttaaagttgctttcaagcaaaatgtgacgaaattgcctaagaaaatcgaggagcatatcttccgcatcttgcaagaattgatcagcaataccctccgccatgcccaggcatcttgtctggatgtctatctctatcagacagattttgaattgcaactgaaggtggtggataatgggattggtttccagttagggagtttagatgacttgagttatggactacgcaatatcaaggagcgggttgaagatatggcagggacggttcagttattaacagctcccaagcaagggctggcagttgatatccgtattcccctgctcgataaggaatgataaaggagtaaagatgaaaattttactagtagatgaccatgaaatggtccgattgggcttgaaaagctactttgacctccaagacgatgtagaagttgtgggtgaggctaccaacggatctcaaggcattgacttagccttggaattgcgtccagatgtcattgtcatggatatcgttatgcctgagatgaatgggattgacgcgaccttggctatcctcaaagaatggcctgaagccaagattttgattgtgagctcttacttagacaatgaaaaaatcatgcctgtcttaaatgctggtgctaggggatatatgctcaagacttctagtgcagacgaactactccatgctgttcgtaaggtggctgctggcgagttggccattgagcaagaggtcagcaaaaaagtcgaataccaccgcaatcacatagaactacatgaggacctgactgcgcgtgagcgagatgttctccaacttatcgccaagggctacgaaaatcagcgtatagcagacgaactttttatctctctcaagacggtcaagacccatgtgtctaatatcctagccaaacttgaagtcagcgatcgtacccaggctgcagtctatgcctttcagcaccacttggtgaggcatgaggagttttagatgagtctagcagatttgcttgtggagctagaagccgcaaaagattctcaaaaagcaggggccatggaagcctatatgcgccatcaattttcctttctaggcattgcggcgcctgaaagaaataaactctataaaaaatactttccaaaagcgaaaaaaacaagggccatcgattgggattttttagatacttgctgggaaaaagagtatagagaataccagtatgtagctgctaattatttgaaagcaatgcagtcttatctaaaggacagcgatttgcctaagctagagcagttggttgttaccaagtcttggtgggatacggtggatatcctagatcgagtagtagggagtttggtgtatgacaagcaggaactggaaaaaataattctccaatggagcctgtcagacaatatctggttgagacgcgtcgctattgaccaccagttgttaagaaaagagaagaccaatgttcaattactggaaaagattctgcttcataatttgaatcaaacagaattctttatcaataaagccattggctgggctctgagagactactccaaaacgaatccagcttgggtagcatgcttcattgagaaaaacaaggaaagaatggctgaccttagtatcaaagaagcaagcaagtacctctcccatcattgaaaagcgcattcattacttgaaaaaagtcgtccatttatgttataatagactgtatttaaaaaattttaaggagaaatgacagaatgtctgtatcatttgaaaacaaagaaacaaaccgtggtgtcttgactttcaccatctctcaagaccaaatcaaaccagaattggatcgtgtcttcaactcagtgaagaaatctcttaatgttccaggtttccgtaaaggtcaccttccacgtcctatcttcgacaaaaaatttggtgaagagtcactttaccaagacgttatgaacgctcttttgccaaacgcttatgaagcagctgtaaaagaagctggtcttgaagtcgttgcacaaccaaaaattgacgtaacttcaatggaaaaaggtcaagactgggttatcactgctgaagtcgttacaaaacctgaagtaaaattgggtgactacaaaaaccttgaagtatcagtagatgtagaaaaagaagtaactgacgctgacgttgaagagcgtatcgaacgcgaacgcaacaacttggctgaattggttatcaaggaagctgctgctgaaaatggcgacactgttgtcatcgacttcgttggttctatcgatggtgttgaatttgatggcggaaaaggtgaaaacttctcacttggacttggttcaggtcaattcatccctggtttcgaagaccaattggtaggtcactcagctggcgaaactgttgatgttatcgtaacattcccagaagactatcaagcagaagatcttgcaggtaaagaagctaaattcgtaacaactatccacgaagtaaaagctaaagaagttccagctcttgacgatgaacttgcaaaagacatcgacgaagaagttgaaacacttgctgaattgaaagaaaaataccgtaaggaattggctgctgctaaagaagaagcttacaaagatgcagttgaaggtgcagcaattgataaagctgtagaaaacgctgaaatcgtagaacttccagaagaaatgatccacgaagaagttcaccgctcagtaaacgaattccttggaaacttgcaacgtcaaggtatcaaccctgacatgtacttccaaatcactggaactactcaagaagaccttcacaaacaatacgagggagaagctgagtcacgtactaagactaaccttgttatcgaagcagttgccaaagctgaaggatttgatgcttcagaagaagaaatccaaaaagaagttgagcaattggcagcagactacaacatggaagttgctcaagtacaaagcttgctttcagctgatatgttgaaacacgacatcacaattaaaaaagctgttgaattgattacaagcacagcaacagttaaataatcttatactcttcgaaaatctcttcaaaccacgtcagcgtcgccttaccgtactcaagtacagcttgtggctagcttcctagtttgctctttgattttcattgagtattaataaacaaaaatcccacctgaattggtgggttttcttatgcactattttccaaaaatctctttgaggtctgcgtctgtaatcccaatcatggctggtatactgtcccagttttcttctgtcaggatgtaggattgttcagaggtacttgatgtggcagtttcagagacagctggttgcttttcttcaacattttccaataaatcactgaagcgttcaatcagataggtttttcgggcagttccgatatgttgggtagcataatcaaaggcctgtaattcgcctagtaagataagcttgcttttggcgcgtgtaatggctgtgtagatgagattgcgctccagcatacgcctgctagcactggtgataggtaggataacaacagggaactcacttccctgcgatttatggatactcatggcatatgccaagcgaatcttgtaccattcgttacgtgggtaagagacttcgttgccgtcaaaatcaatgacaatctcatcttgtttcgactcagtatatttgccgggaatcaggtctgtgatagctcccaaatccccattaaagacattgatttcagcatcgttgaccaaatgaatgaccttgtcgcccttacgatagtggcactggggagcttcaaaactgagctgatttttttgtggtggattgagcaggtcttgcatgagctgattgatagcatcaattcctgccgtccctcggtacatgggagccagaacttggatatcacgggcaggaataccacttctgagggcagcacctaagattttttcaatcgtagctggaatatggccactagcaatttcaaagtaggaacggtctgcttttttctgggtgaaatcagctggcaagatgccctgtcgaatttgactagctagggtgacgatggttgattcttcgctttgcctgtaaattttttccaagcgagtctgaggaatcaagggaatatgaagcagatcagctagaacttgtccaggactgacagaaggcaactggtcgctgtcgcccacgatgaggattttactgttagaagagatgttggagaagagttgattggccagccaagtatccaccatggaaaattcatccacgatgataaagtcagcatccagataatcttccagatgactggtatcatcgtcacctgtcattcctaaatgtcggtgtatggtcgcgctaggcaaacctgtcaattcattcatgcggcgagctgctcgtccagttggagcagcaagaagaatcggcaggttgctttttttcctgaggtcaagtccttctaaaagggcataaacagcgatgattccattgataacagtcgtcttacccgtaccgggcccacctgtcaggataaagaccttgttctggatagcgtcgcagatagcctgtttttgaatgatatcatacttaatccccagatcttcttcgacagtagtgatatgtttttgaatggtttttaaatcctggctcttctgttttcctttttcaaggatacggaccaagtgactgcggatgccttcctcagcgaaaaagaggctgttgtcaaaaattttggtatcaatctgctgaatcttgtcttcttcaatcaggtaggagagctcttgggccacttggctgggatccagttccacgggacgagaagactcaaggagagtaagggtttgttccagcaaatcccgtgcttcaacataggtgtcccctgtttccatacaggtctgaaaaagactgtgaactagaccggcacgaaagcgttcaggagcctgactttcgatgcctagttcttctgctaattggtcagcaatagtaaagcccaaacccttgatatcttcaactagttggtagggataattttcaaccacgtcaagggttttttccttgtaaaagtcttgaatctgaaaggctaatttattgggaatgccgtagttggctagtttggccaagaccatctcggttccgtagttgagacgaagagttgagacgaaggcctcgcgatttttggcagagagtcctgcaatgccttctaacttttctgggtgttgcaaaatttcgtcaatggtattgccgccataggtatctacaattttttgagctgttttgagaccaattcccttgaaatggctacttgaaaagtacttgaccaagcccttgctagttggttttgcgcgttcataacgactgatttgcagttgctccccatacttggagtgctggacaatttgtccccaaaaagtatagtcttctccctcaatcacatcagccatggtgcccgtgacaatgatttcaaaatcatcaaaatcctctgcgtctgtatcgtcgatttctaggagaaggatgcgataaaaattgctgggattttcaaaaataatccgttcaatagttcctgaaaaataaacttccataagattcctttgcataaataggtgagagttaatactcttcgaaaatcaaattcaaaccacgtcagtttcgccttgccgtactcaagtacagcctgcggctagcttcctagtttgctctttgattttcattgagtataactttgtttctatcctagttagactgggtagagaataatcatcttcttacgatagaagaagaggctgagattcttgattctcggcctcttaggtctcttaaaatgttccgatacgggtgattggccagaagcggaatttagcttcccctgtgatatcttttgctttgaaggtacctacgtggcggctgtcgctagaaaccaggcggtcgtctccgaggagaaggtattctccttctgggacagtaaagctaaagttggtgttatagttgacatcaactgtgaaggcttgggctttttgagcgatacttctaaagaaagttcctttatttccttcaaagcccttgcctgagtaggtgctttggagtttgtcatccttgaaacgtttgatgtagtcagctaagtaaggctcatccgtctctttatcattgatgtaaagtttatcattttcataacggacggtatcgccaggcattccgatgacacgcttgacgatgtctttattgccatcttcctcatgggccaccacgatatcaaaacggtcaataggaaggtgcttaacaacaaagaggatttcgccatccgctagagtcggatccatggaatgtccttctacgcggacattactccaaaaaaagatacggctcaaagctagtaatgacagaatcaggaggaacaatccccactcttttagaaatgttttaaaagaatacataacttacctttctaagcgttttttcgctttttcagtatttttaaagtgcagtttggcgcagaagttaagtccctgcataccataggcttgcaaaatctggctagccaccttgtcagatgccgttccagctccacttggaagttgatagcccagttctcgtcccagattttctagattttccagaaagagatcacgcgcaatgatagaagaaactgcgacagccaagtatttgccctcagccttttcttctaggctgataggattgctgaaacgattggcctcttgtgccaagtacttgtcataatttttagcactggtaaaggcatcaatcacaattttctcaggctgaagaccttttttaaggaggagatagatagcctgattatggagggcaaccttaaccgaaacagcgttgtagcggtctccgatgacctcgttgtacttgcttggtgagagcagcagtgcctggtgctggattttttctttgaggataggggcaatctgacggatttttaggtcggtcagagttttagaatcccccacaccaagttttcgcaagaaggcatgctggtcaggtgtgacaaaggaagccacaactgcaagcccaccaaagtaggaaccatttcccacctcatctgtcccaattaaagggaaattttgtcccctgttttcctctacaacttgatatccaaagaaacgagcgtatttctcagctccttcaccctgaagcaagacctttccagaagtatagatagaagccgttgcttgaggtagtcgcaaaaagtagcgaatatagggattcttgctgggagctagactggtttgatagtgttcaagaaaagcctgaatctccttttcacttggtgtgagtgttatacttgccatagtttctattgtatcataaaagcaggcaaatttgtaaaaactgacaaaattagcgaattttggtataatatcgtgaggtgaattttatggcaaatctaaatcggttcaaatttacattcggaaaaaaatcactaaccttgacaagcgagcatgataatctctttatggaggaaatcgctaaggttgcgacagaaaaataccaagcaattaaagaacaaatgcctagtgcagatgatgaaacaatcgctcttttgttggcagtcaactgtttgtcaactcaactcagccgtgagattgaatttgatgataaggagcaagaattagaagaactccgtcacaagctcgtgacttgcaagcaagaacagagcaagattgaggattccttatgatttcattctttcttctattggtcttggcttggggattttatatcggctatcggagaggcctgctcttacaggtttattacctgatttcagccatggcatcggcttttgtggctggccagttttataagggacttggagagcaatttcatttgctgctcccttatgcaaatccgcaggaaggtcagggaactttctttttcccatcggatcaactctttcagttggataaggtcttttacgcagggatcggctacttgcttgtatttgggattgtctatagcatcggtcgtttgcttggtctccttttgcacttacttcctagtaaaaaactgggtggtaagttgttccaagtttcagcagggatcttgtccatgttggtgaccttatttgtcttgcaaatggccttgaccatcttggcgaccatccccatggcagttatacaaaatcctcttgaaaagagtatcgtcgcaaaacacatcatccagagcataccggtaacaaccagttggctcaaacaaatctgggtgacaaatttaatcggataaaaagggcaggagttttcctagccctttgtttacagattgactagaatctatcagaatgtaaaaagctaccacacctagacattcaaagacaaggaaataaagatgaataagaaaatattagaaacattagagttcaataaggtcaaggccttgtttgagcctcatttgttgaccgagcagggcttggagcaattgagacagctggctccgactgctaaagcggataaaattaaacaggcgtttgctgagatgaaggaaatgcaggctctttttgttgagcaaccgcattttaccattcttgcaaccaaggaaatcgcaggagtctgcaagcggttggagatgggagcggacctcaatatcgaggagttcctacttttgaagcgcgtgcttctttctagcagagaactacaaagtttttatgataatctggaaaatgtcagcttggaagaattagccctttggtttgaaaaattacacgattttccgcaattacaaggaaatctccaagcctttaatgatgcaggtttcattgaaaattttgccagtgaagaattggcgcgaatccgtcgaaaaatccatgatagcgagagtcaggtccgtgatgttttgcaggacctgctcaagcaaaaagcgcagatgttgacggaaggtattgttgccagcagaaatggccgtcaggttttaccagttaaaaacacctaccgcaataagattgcaggtgtcgttcatgatatttctgccagcggaaacaccgtctatatcgaaccccgtgaggtggtcaaactgagcgaagagattgctagtttgcgagcagatgagcgctatgaaatgcttcgcattctccaagaaatttctgaacgtgtccgccctcatgcggctgagattgccaatgatgcttggattatcggccatctggacttgattcgtgccaaggttcgttttatccaagaaaggcaagcagtcgttcctcagctgtcagaaaatcaggagattcaactgctccatgtctgccaccctttggtcaaaaatgccgtcgcaaatgatgtccattttggtcaagatttaacagccattgtcattacaggtcccaatacaggtgggaagaccatcatgcttaaaactctgggcttgacacaggttatggcccagtcaggtttgccgattttggcagataagggaagccgtgttggtatttttgaagaaatctttgccgatattggagatgagcaatctattgaacagagcttgtctaccttctctagccacatgaccaatattgtggatattcttggcaaggttaaccaacattcacttttactcttggatgagttgggagctggtacagaccctcaagaaggagctgctcttgccatggctattctggaagaccttcgcctgcgtcaagtcaagacaatggcgaccacccactatccagaactcaaggcctatggtatcgagacagcctttgtgcaaaatgccagcatggagtttgatactgcgactctacgcccgacctatcgctttatgcagggtgtgcctggtcgaagcaatgcttttgaaattgctaaacgtttaggattatctgaagttatcgtaggagatgccagtcagcaggtcaatcaggacaatgatgtcaaccgaatcattgaacaactggaagagcagacgctagaaagtcgcaaacgcttggacaatatccgtgaggtggagcaagaaaatcttaagatgaaccgtgctctcaaaaagctctacaatgagctcaatcgtgaaaaggaaaccgagcttaacaaggcgcgtgaacaggctgctgagattgtggacatggccctcagtgagagtgaccagattctcaaaaatctccacagtaaatctcaactcaagccccacgaaatcattgaagccaaagccaagttgaaaaaattggctcctgaaaaagtagatttgtctaaaaacaaggttcttcaaaaggccaagaaaaaacgagctccaaaggtgggagatgatatcgtggttctcagttacggtcagcgtggtaccttgatcagtcaactcaaggacggtcgctgggaagcccaagttggcttgattaagatgactttagaagagaaagaatttgaccttgttcaagcccagcaagaaaagcaagtcaagaagaaacaggtcaatgttgtgaaacgaacttctggtcgtggaccacaagccagactggaccttcgaggcaaacgttatgaagaggccatgaatgagctagatgcctttatcgaccaagccttgcttaataatatggctcaagttgatatcatccatggtatcggaacaggtgtcatccgtgaaggtgtcactaaatacctacaaagaaacaaacatgtcaagagtttcggctatgccccgcaaaatgctggaggcagtggtgcgaccattgtgacgtttaaaggatagaagtattccgagctttatacagtaaaaactgttgaattaagttttactaataaacacattgacaaaagccaacattttttgtaaaataagaatcaattaaataccaacaccgaatgaagtttaatagaagtggggaatcgtttgattttccatgactgtaaatggacggaactctggagagaccgtaaaggcaccgaaggggcaaggcaggcaactgctcaaactctcaggtaaaaggacagagctaggatagaccgctttttagcatttatctaagcattccagagtacatgtatcttgcatgtgctctttcttttggggttgaaaagataggagaaggaaatgttagaattgcttaaatcaattgatgcttttgcttggggtccacccctcttgattctattggtcgggacagggatttacctaactgctcgtctaggcctcttgcaggttttgcgtttgcctaaggcctttcagcttatttttactaaggacaaggggcatggcgatgtatccagctttgcggccttgtgtacagccctagcagcgacagttggtacgggaaatattatcggggtggcgacggctatcaaggtcggtggcccaggagccctcttttggatgtggatggccgctttctttggaatggctaccaagtatgcggaaggactactagctatcaaataccgtaccaaggatgaccatggtgcagtagcgggaggtccgatgcactatatccttctagggatgggagaaaagtggcgtccccttgctatcttctttgccctggcaggtgtcttagtggctttattggggatcgggaccttcacccaggtcaactcgattacagaatctatccagaatacaacaactatttcgccagcaatcacagctcttgtgttgtctgtatttgtagcgattgcagtctttggtggactcaagtccatttcaaaggtttcaactaccgttgttccttttatggccatcatctatattttgggaactcttacagttattttctttaatattgggaaaatccctgctacaatcgctttaatcttgacatcagcatttagtcctgttgctgcggtaggtggatttgcaggtgctagcattcgaatggctattcaaaatggtgtagcgcgtggtgtgttttcaaacgaatctggtctgggttctgctcccattgcagctgctgccgctaagacaaatgaaccggtagagcagggcttgatttccatgacaggaacctttattgacaccctcatcatctgtactctgactggtttgaccatcttggtaactggtgtttggagtggtgacttgaatggggtggctttgactcagtcagccttctcaacagtcttttcacactttggacctgcccttttgaccatcttccttgtgctctttgcctttacaacgattctaggttggaactattacggggaacgttgttttgagtttctctttggggttcgctttatctggctctaccgtgtggtttttgtactcatggtcttgctgggaggattcatcgagttggatatggtttggattatcgcagatattgtcaatgctttgatggctctaccaaacttgattgccctcttagttttatctccagttgttattgctgaaactaaaaagtattttaataaataatggaatcacacatctcgtgtgattttttgctttcataaaaaatttctatcagtgcaatttaaaatatatattatacacggtatagaatctgtgatagactagatttcaacaaaataaaaagaggttttatgatgacaacatttacaatccatacagtcgaatcagcaccagcagaagtgaaagaagttcttgaaacagtagaaaaagataacaatggctatattcctaacctaattggtctcttggctaatgcaccgactgctttagaggcttaccgtactgtcggagctatcaaccgtcgcaacagcttgacacccgttgagcgtgaagtggtgcaaatcacagcagccgtaaccaatggttgtgccttctgcgtcgcaggtcacacagccttttcaatcaaacaaatccagatgaatgatgaccttttgcaagccctccgcaatcgtactccaattgaaacagatcctaaattggacaccctagctaagtttaccttggcggttatcaataccaagggtcgtgtaggagatgaagccttatctgaatttttagaagctggctacacccaacaaaatgccttggatgtggttcttggtgtcagcctagcaagcctttgtaactatgccaacaacctagctaataccccaattaatccagaattgcaaccttatgcttaattcatatctgagtaaaatgaagtctgaaataatcggacttcgtttttttatcccctcatttaagcacttttatgctatactgaaactgacatgattattggaggttaagatgaaaaaactccccttggtattttctggttgtttgctaggtttggcaggagctggaaatcttatgttagatacgttaccgattctgtcccatctgcttagtctgacaggtttgattttgtggatttactttctgattttgcatttgtttagttggaaggaaaccaagcaagaattgactaagcctcctcttttgtcaggaatggggacctttcccatggctgggatgattttatcgacttatgtctttcgcattttccctcatttgccaatagtagcgcaaggactctggtggttttcttttctcttggattgggccttgattgttatttttacaattaaatttgcctatccatgtaagagagtaaactctactcccagctggacggtgctttatgtggggatagcagtggcagccttgacctatcctctcgtaggtatcatcgaaattgcctatgtgaccttgatttttggatttctcttgaccttctatctctacccgcttatttatagcgatttaaagaaacatccactcccgctagccttgcttgcgcaagaaggaatctactgtgctcctttctctctactcttggcttcccttgttcgagttggaggagagagcttaccaaattgggtcttaatcgtcatgattttggcttctcaatccttctttttctttgttttaactcgcctgcccaatattttaaaacaaggctttcaaccatccttctcagcccttcccttcccaaccattagcacagctatcgcgctcaagatgtctcagggaattttgaaacttccatttctggattatctggtagtggctgaaaccgttatttgtctaactattttattctttgtattaggcgcttatctgatttggttacgaaaaaaggtctagctagaaatagctaggccttatttttatggtttgataacttcagctccacccatgtatggacgaagtgcttctgggatggtcacagaaccatcttcattttggtagttttcaagaatagcagccactgtacgtccaactgcaagtccagaaccgtttaaggtgtggagcaattttaccttgccatctgcttcatcacggtaacggatttgggcacgacgggcttggaaatcttctgtgtttgaacagcttgagatttcacggtaggtattttgtgctggaatccaaacttccaagtcgtaagtcttggcagctgagaagcccatatctccagtagagagagcaacgacacggtatggaaggttaagtttttgaaggatgttttcagcattggctgtcattttttccaattcttcgtaagattcttctggtttggcaaatttaaccatttcaaccttgtggaattggtgcaaacgaatcaagccacgagtatcacgaccagcagaaccagcctcagaacggaatgaaggactcatagcagtgaagtagattggcaggtctttaccatcaaggatttcatcacggtagtagtttgttagaggaacttcagctgtaggaatgaggacataattgctgtcgctcaattcaaaagtatcttccttgaattttggatattgaccagtaccaaacatagaatcgtggttaaccatgtaaggtgtgatgacttcagtgtagccttcttttccatgttcatccaacataaagttgtaaatagcacgttccaaacgagcgccgagacctttatagaagaggaagcgagctcctgttaccttaccaccacgttcccagtcaaggatgccaaggtcttcacccagatcccagtgagctttaggttcgaaatcaaactcgcgtggagtaccccaacggcgaacttccacattgtcatcttcgtcaaccccaacaggaacgctatcagctggaatatttggaagagtagtggtaaattctgtcaatttagcatcgatttctgccaattcagcatccaaggctttgacttcagcagatagagtttgcatggcagcaatcttgtcatctgcattttccttgttgcgcttagcttgggcaatctcagcagaaactgtgttacgttctgcttttaaagtttcaaccttgaccaagatgtcacgacgtttagcatcgatttctttcatctcattcaagatagcagcatctacaccacgtgtagctaatttttctgcgacagcatcaaagtctgtacgaatacgtttgatatctaacataagaactcctttatgaaaaaagcacacctgacaaagcgttggagtggcagggccacggttccatccaacttcacaggtgtgcacttgattgtgtatgcaattgttactaacggtagaatttcacctatccctcctatctgctcgcagcacccgcagactttctgaaagaagaagataacctacttatccgttgctatgattatactaaagtttctacttttttgcaaatagatttttaaatttttgactaatggtttgaatcagggtcggaagtttgacgaccttgtcattgcccagtttttcgcgagcaattttaagaatggcacctgagtcttttgaagcaaagaggaattttcctctgtctgtaaagacttcgaagtggcgactgatttttcgcccagtgacatttgccccaatttggttgatatggctccaaggaatctggataaattgttcaacattgacatcggggtaaaattccaaagcctgatctccgacaaggaatttcccaactttcccagctatagagaggtaggaggtgcctgtcgtattgaggagcactgttttgttaagtgattgagccatgcttagtcttccttactttcaccgaaaaaggcattgtagagggctttaatagctgctttctcttggtccttatggacaacaaacatgatagacacttcactagaaccttgagacatcatctggatgttgatcttattttcagatagagcacgtgtcgcagtagcagttactccgatatggctcttcatcttttctccaacaatcataatgattgaaaggtcgtgctcgatttctgcatggtctacttcagccttttgaaccaactgacgaaggatttcttcttccttgataggagttagttcgcgagaacggagaatgattgaaagatcgtcgatacctgttggcatatgttcccaaccgatgttaagatcttcaaggatttgaagaaccttgcgtccaaatccaacctcacggttcatgaggtatttagacatgttgatgctgacaaagccagagtcaccagcaattcctactactggaaattcatcactactgtgttttagaacgatacgagtacctggatgatcaggattgttggtattcttgataaccagaggaatttttccacggtaggcgggaagaagggcttcgtcatgaaggactgagaagcctgcataggccaactcacgcatttcacggtaggtcaactctgggatagagtgtggttggtgaatgattcctgggtgagccgcaaagataccatcaacatccgtaaagttttcatagaggtctgccttaacaccggcagcaatgatagaacctgtaatgtctgatcctccacgtgagaaggtacagatttgattttccttggtaactccaaagaaaccaggaatgacaagaacttcatttgtatttgtcaattcttcaatcttgtcataacttgatggaatgatgcgagcgtgaccaggttcacttgtgaccacaataccagcttctctagggtgcacatagcgtgcatcgatcccgttttgattaaagtaggcagcaatcaatttagcattgttattttcaccagctgctaggaaagtgtcgtagagaaattcgttttcttcgataggaagagtagctaaggcacgaatgcttttagaaattttttctagcacagctggtttaagacctagttcactaaccatagcagcatagcggtcgataatccagttttgactcttactaatatcgttaccagcaacatagtcgcggtagtatttaatcaaggcatccgtaaccttagtatcttcagcattgcgtttaccaggcgcagaaacgactacaaaacgacgctctgaatcgctttttacgatgtttaaaactttttctaattgactagcagaggcaagagagctacctccaaatttaacaaccttcataagaactcctaaagtaagtattttatacgattatagcagaaagaaagccttttttcaatgaagaaaataagatgctttctagtataaagcgatcctttctaatcggctgagacactttcagttgattttttcttgctttctgattttaaaaaagatatactttgaaaatagaataatttaaactgcttataaaataaaaaggagtcctgatggaacacattatttatcagcttgaagaggatttggcaattcttaccttgaatcgtcctgaggtcgcgaatggttttcatattcctatgtgtgaggagattttagaagctctgactttggcagacgaggatccggctgtgcattttgtcttaatcaacgcgaatggcaaagtcttttcagttgggggagatttagtagagatgaagcgggcagtggatgaggatgatattccatcattgacgaaaatcgcagaattggtcaatactatttcttataaaatcaagcaaattgcaaagcctgttttgatggaagttgatggggctgttgcaggtgccgcagcgaatatggctgttgctgcagatttctgtctggcaacggataaggctaaatttatccaagcctttgttggagttggtttggctccagatgcaggaggaattcatcttttgagccgaagtattggtgtgacgcgtgctactcaactagccatgacaggagaggctttgacagcagaaaaagctctagagtggggcctagtttaccgcgtttctgaagctgataaacttgaaaagacgagagaacagcttcttaaaaaattaagacgtggttcaagcaattcctatgctgccattaagaagttggtgtgggagagccaatttaaagattggcaagattatgctactttagaactgaaccttcaggggtcactagcgaaaacagaggatttcaaagagggagttcgggctcattcggaaagaagaagacctaaatttacaggaaaataaaaaaatacttgcaccattctttgaactttgatataattctcttgtcaaatgttttgattctaaaagtttttttgaaaaggagggaaggaaagattggactaccaacgaattaatgaatatttaacgtctatatttaacaatgtcctcgttattgaggaagttagcttgaggggtagtcgtttcaaggatatctccatcaaagaaatgcatacgattgatgtgattggaaaagttccagatgtgacaccaagtcaagtgtcaaaagagttgatggttactcttgggacagttacgactagtttgaataatctcgaacgcaagggttacattgaacgcattcgttcagaacatgatcgacgtgtagtgcatctgcatttgacaaagaaaggtcgcttggttcatagactacataaacgcttccacaaggctatggttgaaaaaatcattgatggtatgagtaagcaagagatggaggttatgagcaaaggtttgaccaatctttatcaatttttggaggatttgagataatggcttttgcaaaaataagccaggttgctcattatgtgccagagcaagtggttacaaatcatgatttggctcagattatggataccaatgatgagtggatttcaagtcggacgggaatacgacaaaggcatatttcaagaacagaatctactagtgatttggctacagaagttgccaagaaactgatggcaaaagctggaatcacaggagaggagttggattttatcatcctagctaccattactccagattcgatgatgccctctacagctgctcgtgttcaagctaatattggtgctaataaggcctttgtttttgacctaacagcagcttgcagtggatttgtatttgctctttcaactgctgaaaagtttatcgcttctggtcgctttcaaaaaggcttggtgattggtagtgaaaccctctctaaagcagtcgattggtcagatcgatcaacagctgttttgtttggagatggtgctggtggtgtcttgttagaagctagcgagcaagagcgtttcttggcagagagtctcaatagtgatgggagtcgtagcgagtgtctaacttatggacattcaggcttgcattctccgttttcagatcaagaaagtgcagattcatttttgaagatggatgggcgcgcagtctttgattttgctattcgggatgtagccaagtctatcaagcagactattgaagaatctcctgtagaggcaacagacttggattatctgctacttcatcaggctaatgaccgtatcttggataaaatggctaaaaaaattggtgttaaccgagataaacttccagccaatatgatggaatatggcaataccagtgcagccagtatcccgattttactttcagagtgtgtagaacaaggcctcatccgtttagatggtagccagactgttctactatcaggcttcggtggaggcttgacatggggcacgctcattcttacaatttaggtaatcatgtggtgaacacattgttataaaaaaactatttattttaaaggagtcctatcatggcagtatttgaaaaagtacaagaaattatcgttgaagaacttgggaaagacgcatcagaagtaacacttgaatcaacttttgatgatttggacgcagattcattggacttgttccaagtaatctcagaaatcgaagatgcttttgatatccaaatcgaagcagaagatgacttgaaaacagttggtgacttggttgcctatgttgaagagcaaacaaaataagcagaatataagatagaaggagtagggaaacccgctccctcttgtttaggcaatagtttgattgtcaaattatgacggtatcgaactattacgtaagcaagaaacgatggaggcactatgaaaacgcgtattacagaattattgaacattgattatcctatttttcaaggaggaatggcctgggttgctgatggtgatttggcaggagctgtttccaaggctggaggactagggattatcggtggggggaatgcccctaaagaagttgtcaaggaaaatattgataaaatcaaatcattgactgataaaccctttggtgtcaacattatgctcttgtctccctttgtggaagatattgtagacctcgttatcgaggaaggggttaaggtagttacaacaggcgcaggaaatccaagcaaatacatggaacgtttccatgaagccggtattacggttattcctgttgtaccaagtgtggccctagctaaacgcatggaaaaaatcggtgcggatgccgttattgcagaaggaatggaagctggggggcatatcggtaaattaacaaccatgaccttggtgcgccaggttgctgctgctgtatctattcctgttattgctgcaggagggattgcggatggtgaaggtgctgctgctggctttatgctaggtgcagaagctgttcaggttggaactcgttttgtcgttgcaaaagagtctaatgcccatccaaattacaaggcgaaaattttaaaagctagagatattgatactacaatttcagctcaacactttggacatgctgttcgagctattaaaaaccaactgactcgtgattttgaaaaagctgagaaagatgcctttaaacaagaaaatccagatttagaaatttttgaacaaatgggagcgggtgctctagccaaagcggttgttcacggagatgtggatggtggatctgttatggcaggtcagatcgcaggacttgtttccaaagaagaaacagctgaagaaatcctaaaagatttgtattacggagcagctaagaaaattcaagaagaagcctctcgttgggcaggagttgtaagaaatgactaaaacggcctttttatttgctggccaaggtgcccagtatctaggtatgggacgggatctctatgatcactaccctattgtcaaagaaacgattgatcaagcaagtcaggtgcttggttacgatttgcgtcatctcattgatagggaagaagaaaaacttaaccagacccgctatacgcaaccagccattttagcgacttcagttgctatctaccgtttattgcaagaaaagggctatcaacctgatatggttgctggtttgtctcttggagaatactctgccttggtggccagtggcgccttggattttgaagatgcggttgccttggttgctaagcgtggagcctatatggaagaagcggctcctgctggctctggtaagatggtagcagttctcaatacgccagtagaggtcattgaagaagcctgtcaaaaagcttccgaacttggagtggttaccccagccaactataatacacctgcacaaatcgtgattggtggggaagtggttgcagttgatcgagctgtagaactcttgcaggaagctggtgccaaacgcttgattcctcttaaggtttcaggaccttttcataccgctctccttgagtcagctagtcagaaactagctgaaactctagctcaggtaagtttttcagattttacttgtcccctagtcggcaatacagaagctgcagttatgcaaaaagaagacattgctcaactcttgacgcgtcaggtcaaggaaccagttcgtttctatgaaagtattgcggttatgcaagaagcaggcgtaaccaactttatcgagattggaccggggaaagtcttgtcaggctttgtcaaaaaaattgataagacagctaaactagccaatgttgaagatcaggcgagtttggaagctcttctaggaaactagtaatcccttctcccataaatacaggaggaaacaggagaaaagaatgcaactaaaaaataaaaatatctttattacaggttcgagtcgggggattggtcttgccattgcccacaagtttgctcaggcaggagccaatattgttttaaacagtcgtggtgcaatttcagaagaattgctcgctgagttttcaaactatggtgtcaaggtggttcctatatcaggagacgtgtcagattttgtagacgctaaacgtatggttgatcaagctattgcagagctgggttcagtagatgttttggttaacaatgcaggaattacccaagataccctgatgctcaagatgacagaagcagattttgaaaaagtgctcaaggttaacttgactggtgcctttaacatgacacaatcagtcttgaaaccgatgataaaagctagagaaggtgctatcattaatatgtctagtgttgttggtttgatgggaaatatcggtcaagctaactatgcagcttctaaggctggtttgattggttttaccaagtctgtggctcgtgaagtggccaatcgcaatatcagggttaatgctattgcacctggaatgattgagtccgatatgacagctgttctatcagacaaggtaaaagatgctatgctggcacaaattcctatgaaagaatttgggcaggcagagcaggttgcagatttaacagtatttttagcaggccaagattatctaactggtcaagtggttgccattgatggtggcttaagtatgtagcagaagctagaggtaaaaaagatgaaactaaatcgcgtagtagtaacaggttatggagtaacatctccaatcggaaatacaccagaagaattttggaatagtttgacaactggaaaaatcggaattggtccaattacaaaatttgatcatagtgactttgatgtgcataatgcagcggaaatacaagattttccttttgataaatactttgttaagaaagataccaatcgtttcgataactattctttgtatgccttgtacgcagctcaagaagccgttaatcatgcaggtcttgatgtagagactcttgacaaggatcgttttggtgttatcgtggcctctggtattggtggaatcaaagaaattgaagatcaagtgcttcgcctaaatgacaaaggaccaaaacgtgtgaaaccattgacccttccaaaagccttaccaaatatggcttcaggaaatgttgctatgcgttttggagcaaacggtgtttgcaaatctatcaatactgcctgcgcttcatcaaatgatgcgattggggatgccttccgctcaattaaatttggtttccaagacgttatgttggtaggtggttcagaagcctctatcacaccttttgctattgctggtttccaagccctaactgctctctcaactacagaggacccaactcgtgcttccattccatttgataaggaccgtaatggttttgtcatgggtgaaggttctgggatgttggttcttgaaagccttgaacacgctgaaaaacgtggggctactatccttgctgaggtggttggttacggaaatacttgtgatgcataccacatgacttcaccacatccagaaggtcagggagctatcaaggccatcaaactagccttggaggaagctgagatttctccagagcaagtagcctatgtcaatgctcacggaacgtcaactcctgctaatgaaaaaggagaaagtggtgcgatcgtggctgttcttggtaaggaagtacctgtatcatcaaccaagtctttcacaggacatttgctgggggctgcaggtgcggtagaagctatcgtaacaatcgaggctatgcgtcataactttgtaccaatgacagctggaacaagtgaagtatcagattatatcgaagccaatgtcgtttatggacaaggcttggagcaagaaattccatacgctatttcaaatacttttggttttggtggccacaatgcagttcttgctttcaaacgttgggagaataaataactatgaatttaaacgatattaaagacttgatggctcaatttgaccagtcaagtttgagagaattttcttataaaaatgggacggatgagttacagtttagcaagaatgaagctagactcgtatccgaagttgcagctcaagtcgctccagcgcccgttctagcaacaccaagtccagcggctcctacatctgctccagcagagcctgtagcagaagaagttcaagctccagctgaaacaagtgtagctgctgagggagatgttgtagagagtccacttgttggggtggcttacttggctgctggtccagataaacctgcctttgtaacagttggtgatagtgttaaaaaaggccaaacattggtaattatcgaagccatgaaagtcatgaatgaaatcccagctcctaaggatggtgtggtaacagaaattctcgtttctaatgaagaaatggttgagtttggtaaaggattggtacgtatcaaatgatcgatattcaaggaatcaaagaagcccttccccaccgttatcctatgctcctagtagaccgtgtgttggaagtgagcgaggataccattgttgccatcaaaaatgtaaccatcaatgagcccttcttcaacggtcattttcctcaataccctgtcatgccaggtgttctgattatggaagccttggcgcaaactgctggtgtcttggagttgtctaagcctgaaaataaaggacaactggtcttttatgctggtatggacaaggttaaattcaagaagcaagttgtaccaggtgaccaattagttatgacggcaacgtttgtaaaacgtcgtggcaccatagctgtggttgaagcaaaggctgaagtggatggcaagcttgcagccagtggtactctaacctttgcaatagggaactaaggaggttctccatgtttcgaaaaattttaattgccaatcgtggtgaaattgcggtccgtattatccgtgcggcgcgtgaattagggattgcgacggtagcggtttattcaactgctgataaggaagcccttcatacgcttttggcagatgaagcggtttgtatcggtcctggtaagcctacagagtcttatctcaatattaatgcggttctatcagctgcagtcttgactgaggctgaggctattcacccaggttttggatttctcagtgaaaattccaaatttgcaaccatgtgtgaagaggtggggattaagtttatcggcccatctggtcatgtcatggatatgatgggagacaaaatcaatgcgcgtgctcagatgatcaaagctggtgttccagtcattccaggttcggatggagaagtgcataactctgaggaagctttgactgtcgctgaaaaaattggctatcctgttatgctcaaggcttcagcaggtggaggtggtaaagggattcgtaaggttgaaaaaccagaagacctcgtttcagcctttgaaacggcctctagcgaagccaaggccaattatggaaatggtgccatgtacatagaacgggtcatctatccagctcgtcatatcgaggttcaaatcttaggagatgaacacggaaatgtgattcacttgggggaacgggattgttctcttcaacggaataaccaaaaggttttggaagaaagtccttcaattgcaatcggaaaaacgctgcgtcatgaaatcggtgcggctgctgttcgagctgcagagtctgttggttatgaaaatgcagggaccattgagtttcttcttgatgaagccagtggtaaattctattttatggagatgaatactcgtgtacaagtagaacatccagtaacagaatttgtttcaggtgtggatatcgttaaggaacagattcgcattgcggcaggtcagcctctgtctgttaagcaagaagatattgtcctacgcggtcatgccatcgagtgtcgtatcaatgcagaaaatccagccttcaactttgctcctagtccaggtaagattaccaatctccatctgccaagtggtggagttggcttgcgcgtggattcagcagtttatccaggctataccattccaccttattatgatagtatgattgctaaaatcatcgttcacggtgaaaatcgttttgatgccttgatgaaaatgcaacgtgccctctatgaattagagattgaaggggtgcagaccaatgcagatttccagcttgaccttatttcagatcgcaatgtcattgctggagattacgatacttccttcttgatggaaacatttttacccaagtatcaagaaaaagaataaaatgacttcaagagtttaaaccgaaaaggggaatcaatggctctatttagtaaaaaagataagtatattcgaatcaatcccaatcgttcggttagggaaaaacctcaagctaagccagaggttccagatgaattattctcccagtgtccaggctgtaagcataccatctatcagaaggatctgggaagtgagcgcatctgtccacattgtagctatacctttcgtatttctgcccaagaacgcttggctttgacgattgatatgggaaccttcaaggaattgtttacagggattgaaagcaaggatcccttgcatttccctggttatcaaaagaaactagcaactatgcgtgaaaaaactggtctggacgaagccgtcgtgacaggaacagctcttattaaaggtcagattgtggctcttgggattatggattccaattttatcatggcttctatgggtacagttgtaggtgaaaaaatcactcgcttatttgagtatgcgactgtcgaacaattgccagttgttctattcacagcctctggtggagcccgtatgcaggaaggaatcatgagtctcatgcagatggccaagatctctgcagcagttaagcaccattcaaatgctggtctcttttatctgaccattttgacagatccaacgacaggtggtgtgacagcttctttcgctatggaaggtgatatcattctggctgaaccacagagtttggtcggttttgctgggcgtcgtgtcattgaaaatacggttcgtgaaagcttgcctgaggatttccaaaaggcagaattcctattggaacatggctttgtggatgctattgtcaaaagaagagacttgccagacaccatttctagcctagtcagattgcatggagggagtcctagatgaatattgcaaaaatagtcagagaagcgcgtgagcagagtcgcttgacaaccttggactttgcgacaggcatttttgatgaatttatccaattacatggtgaccgttcttttcgtgacgatggtgcagttgttggtggtatcggctggcttggggaccaaactgtatcagtggttggtatccaaaaaggcaagagtttacaagataacctcaagcggaattttggtcaaccgcatccagaaggctaccgtaaggccctacgtttgatgaaacaggctgaaaagtttggtcgtccagttgtgacctttatcaatactgcaggtgcctatcctggtgtgggagcggaagaacgtggtcagggagaagctattgctcgcaatctcatggaaatgagtgacctgaaagttccgattatcgccatcattataggtgaaggtggttcaggtggggctctggctctagccgttgcagaccgtgtctggatgttggaaaattccatctatgccattctcagcccagaaggctttgcttctattctatggaaagatggtactcgtgccatggaagcggcagagctgatgaaaatcacctcacatgaattgttagaaatggacgtggtggataaggtgatttctgaagcaggactttctagtaaagaactgattaagagtgtcaaaaaagaactccaaactgagctagccatactttcacaaaaaccgttagaagagttgttggaagagcgctatcaacgatttagaaaatactaatacctcagaatacataaaaactagaactggcagtcagttctagttttttatgtggttcttactctgtatcaaggacgaggtaaaaggtgcttgggaaaccaaacaccttttcgattattcattttcttcagttacaaattgactaagcagtccgttgataaagcgggctgatttttgatctgaaaaattcttagcaagttcaatagcttcattgactgctaccagctgaggtgtatcaaatgatgtgatttcaaagatacccaagcgtagtaagtttttttcgaccaaggtcaatcgttcaactgtccagcctgacttgaggtgctggttgatttgtttatccaactcgtctttttgagcttgaacaccagaaaccaagttcagaagaaaggcagggatttgcacatcttcatcttcacggtcatgtgtatatgcaaagtgacaagctgtttccatatctgtgccgaattcaaggctcatgagggcttgaaaagcgcatttacgaagttcgcgtctagattctaataatggactagtcattgaggaagtcctcgttaaatagatctttcaactcaggttttggtgttttatctggaacgattcctgcaacatggatgttaacagcagcaagttccacatcagccatatctcggacagcatctttgactgctttttgaatagcaagagcaacttttggtactttcacaccgtactcaaggtagaggtagatgtcagcagttagttcttcgttgctttcttttaagtagacgccacgaccaagagagagttttgatagggtatcagatacggatttatttgaaaatgagtggacaccatcaactttagcagttgtgatggcaatgattttttcaagtacacgtggagcgataacgatttcgccaaattgttcttcaattcccatagaatgacctctttctagagattaggcacgagaaacgtaagttccttctgcagtgttgatgatcaatttttgtccagcttcgatgaagtcaggaacgttgacaacaagtccagtttccatagttgctggtttaccagaacctgtaacagtagcacctttgatagatggttgtgtttcagcgactgtcaattcaacagtagttggtacagttacaccgattacttcagttccgtagaattggattttcacatcagagttttcaaggatgtaaagcaattcattttcaacgtttacgactgggatttcgtattggtcgtaagtttcagtgttcatgaagtaggcagtttcatccattttgtacaagtattgagctgggacagtttcgataatagcttgttcgaatttttcttctggacggtagcttgtgtcaaatgtagaaccagtacgaacatcacgcaatttcatacgcatgattgtgtttcctttacctggtttgtggtggctagcttccaaaacgcggatcaattttccgtctgcagtttcaaatgtcataccagctttcaatttgcttgcttcaatcatgtttttacctctttaataaatattattactcttcattttaccataaaatcttctggaaataaagccaaaatagttattgggagatggtaggggagaaaaagaatattgcctagtcaggtggagtggttaatgttaaagagtatctaccatatttcttctcatactcaatggaaatcaaagagcaaactaggaagcaagccgcaggttgctcaaaacactgttttgaggttgtggatagaactgacgaagtcagtaaccatatatacggtaacgtgacgctgacgtggtttgaagagattttcgaagagtattatatttcaaaaggccgaagtaagcttactccgacctgttagtattgtcttaaaaagattgatttttattctggttctaccaaaattttaatttgtgacttatcttgagttaattcgataaagccttcttcgacgatattttccaatttgattttcttagtaaccaatttttcagcagagaagtagccttgttccatcaattctaatactttagggaagatatgacgataagcaatgattccttttagtgtcttttcttggattgcaaattcattcggattaatatttgcttctcgttcccagatagagaccaccatgcactcacctgctttatgtacggcagctaaggcttgtcctaaaactactggcacacccgttacttcataagaaacatctacaccaccgtttgttaaacgatgaatagcttcaacagctgtttcaccttcttccggacggacaacgatagctcctaactcttcagcttttgcttgacgttcaggtgatagttcaacagcataaatcttagaagcacccgctgcacgaagggcttctataattaagagaccaatcggacctaagccaaagacagcagcagtatcaccagcttttagtgctgattgacgaactgcataaactgcaacagcagctggctcagtgagagcagcttgctcatagcttaagctatctggaatgacatgtactaagtcaccgtctaaaacacaatatttggcaaatccaccgtctgcagccaaaccgacaaaattaaggtttggatccaaattataattaccaactaagttattcttagctagaattggttctacagcaacacgatcaccaactttaacacgagtaacatcgcttccgacttctacaatttcaccagaaaattcatgtcccagtgttactggtgctttttgaccagaatagacatgttcttctgttgggatgaagatagggccatctaaaaattcgtggaggtcagtaccacaaattcccgtgaatttaacagcaacttttacttggtgcggaagtacctcagggacttctacttcttgaatacgaacatcttttgctgcatgccagcgagctgctttcattgtagccatatgaataactccttattgttacgatttttagttttctttttaggaaactttacatgtaacattgtaaacgctttccttgtatttgtcaagaaaaaaccaacctcaaggctggtttcttttacatattaatcttctttcaacttcgctaattcctgagcaaggagtttaagggcgacttgtgggttggcttggcctttggttgctttcataaggaatcctgtgaaggccttatctgcgttacgtttacctgacttgaagtcggcaaccgccgcttcgttatcgacaaagacttggtggatgattggaatcaggatttcaggatctgagatttgaaccatacctgctttttcaacgtattcacgcgctcctccgccatttttagctaggtggacaaagactttcttagcaatcttagaagagatagtgccgtcttcgatgatggcaatcatttcaaccaagttttctggtgtcaattcgatttgttctagtgtcttgccttcggcattcaagaactgagcgacttccccttggagccagttagagacttgtttggcatcgccaccgagggtaacagctttttcaaagaagtcagaagtgactttgtttgccgtcaactgactagcatcatagtctgacaagccaaggtcagatacataacgcgcacggcgttcttttggaaactctggcaactcagttcgcatttcctcaatccactcgtctgagatttcaaagattggtaggtctggctctgggaagtagcggtagtctgcagctccttccttgacacgcatgaggatggttgccttgttagcttcatcgtaacggcgtgtttcttgacggatttgaccccctgagcgaaggatttcagcttgacgttggacttcgtattcaagacctttacgaacgtttgagaaggagttgaggttcttcaactctgtcttggtaccgaatttctcttgaccataagggcgaagggagatattggcatccacacgcatagaaccctcttccatcttaacgtcagaaataccagcgtactggataacctccttgagggctgttagataagcataggcttcttcaggagaacgcatgtcagcttcagatacaatctcaatcaatggcaccccttggcggttgaggtcaacataagagtagccatctgtaccgtgggtgtttttaccagcatcttcttctaggtgggcacgttcgataccgattttcttagttgtaccgtcttctagctccacttcaatccagccgttataaccgattggctcatcaaactgagaaatttggtaggcttttggattatcagggtagaagtagttcttgcggtcaaagtgcatctttttgtggatgtccatgttgagggcaagagcagccttgataccggcatcgacaacacctttattaagaactggcagaactcctgggaaagaccaatcaatcacgttagtgttggcattttggtcatttccaaagtgggcagaagtaggtgagaagatttttgaattggtgttgagctctacgtggacttcaagtccaatgactgtttcaaagttcattagttatcacctccaaaaatcacgggttgttgtttgtggtagtctgttgtcgcctcaaaagcagcagcagcttggtaaatggtttcctcagagtacttaggaccgatcaattggagaccgacaggcagaccttgagagaatccagcaggaatagaaattccaggcagtcctgccaagtttacaggtatggtcaagaggtcagccaagtacatagcaactgggtcgtggttgagtgaatccaagtcataggcaacactaggagcagttgggcccaaaatcaagtcgtaatccgcgaagactttttcgaaatcttggatgatgagggtacggacctgaccagccttcttatagtaggcgtcatagtaacctgatgaaagactgaatgtgccaagcatgatacggcgtttaacctcttcaccgaaaccttggctacggctgtttacatagatttcatcaaggttggttgcatcttctgcgcggtagccgtaacggataccgtcaaaacgttgcaagtttgatgaagcttcagatgaagcaatgatgtagtagacggcaacaccgtattttgagtgaggtagactcacttcttcaacaatagcaccaagtttttcaaagtgtttggctgcgttcagaatggttcccttaacctctgggtcaattccttcaccaaggtattccttaggcaaagcaattttcatgcccttgatgtcttggccgatttttgaagtaaaatcggcaatgcggacaggagcagaagtagagtctttggcatcttcgcttgcaatagcattgagcaagaaggcattttccttaacagtcggagcgaaaggtccaatctggtctaatgaactaccaaaggcaatgagaccgaaacgtgaaactgttccgtaggttggtttgagaccgacgatcccattgaaggcagcaggttggcggatagatccaccagtatcagaaccaagtgacaagcgaacttgtcctgaggctacagctgcagcagaaccacttgatgatccaccagggaccttgctgtggtcccaagcattttttagtggcaccgtagtaagaagtctcacctgatccacccatggcaaactcgtccatgttggttttccctacgacaatcatgcctttcgcttttgcattggcaacggctgtcgcatcaaagattggctcgtagttgtagagcatttttgaggctgcagttgtaagaataccgtctgtagagatattatccttaactgcaagtggaattcctgaaaggacattatcagcatcgattccagcttcatcaatagctttagcttgagcaagagcttgctcttcagcgatggtaacaaaagcgttgatagcggtctcgcgagacttgatatcttcaagtgttgcttgtgttaattcagttgctgaaatttccttagagacaaggagattgtgcaagtcttcaatggttttattgttgaaagtcattaggcatctcctccatcgtctaggatagctggtaccttgatatagtagttgtctttttcaggtacgtttttaaacaagcgatcacggtctgttccttcttcggccacatcagggcggagtacagtcttgcggtcagccatggttgtagtaggtgcgacaccagttgtgtcaacttcgcccagcaattcaaccatgtcaacaatcttagacaaggtagtcgcaaaggcagcagtttcttcttcagagaatcttaattttgaaagattggcaacgtgtgttacctcttcttgcgtaattttcatcttgcatcctttcgtgaaatgatgatttttagtctgttctattttaccatattttcctataaataagggaaggaaagatgaaaaaagacaggtataggatggagaacggattctgatgatgatttatttgaaaagcggatttcaaaggggaaaatatatggtacaatagtttaacagagaagtgaagacggtggttacaaaatcgaaaggatggtgatgcttatgtgcagaacctgtaaaatcttagtagaaaggagtaaccagatttgtccccttttgaggctttgacactcatgtttgtagctggtaactttgttatcacgctcctaaggttcatccttgaattggtaaaagagacaaaaaatagccgtcctaactttggcgagttaacgagctattttttagttatgtaattacagccaccgtcttaaacggctctgtggggtgttgttgtcgcaacacctttttctatatttattgtaacatttatttgaaaaattgcaaggggaattgttctactttagcagtgtctgatataaaatagaaattgaaaaaaatgctaaaatccgatataatggagtgttgaaaggaatggtaaaatccaatgtagaaatcattcttagctattgaaacaagaaaaatagagaatcaaagaaagagaacttatgaatattcaagaagaaattaagaaacgtcgtacctttgccatcatctcccacccggacgcggggaaaacaactatcactgagcagttgctctactttgggggcgagattcgtgaggctggtaccgtaaaaggaaagaaaacagggacttttgccaagtctgactggatggatatcgagaagcaacgcgggatttcggtgacttcatctgttatgcagtttgactacgatggtaagcgcgtcaacatcctagacaccccagggcacgaggacttttcagaagatacctatcgtaccttgatggcggtggatgctgctgttatggtcgtggactctgccaagggtatcgaggctcagactaagaaattgtttgaggttgtgaaacaccgtggcattccggtcttcacctttatgaacaagctagaccgtgatggacgtgagccactggacctcttgcaagaattagaagaagtactaggcattgcgagttacccgatgaactggccaatcgggatggggaaagccttcgaggggctctatgacctctataaccaacgcttggagctctataaaggggatgagcgttttgctagtttagaagatggggacaagctttttggcagcaaccctttctacgagcaagtcaaggatgatattgaacttttaaatgaagctgggaatgagttttcagaggaagctattctggctggagaattgacaccagtcttcttcggttcagctttgacaaactttggtgtgcaaacattccttgaaacttttctcaagtttgctccagagccacatggacataagaaaacagacggagaaattgttgatccttacgataaggacttctcaggatttgtctttaaaatccaagccaacatggaccctcgacaccgtgaccgtattgcctttgtacgtatcgtatcgggtgaatttgaacgtggcatgagtgtcaacttgcctcgtactggtaagggtgctaaactgtctaatgttacccagtttatggctgaaagtcgtgagaatgtgaccaatgccgtggcaggagatatcatcggggtttacgatacaggaacttatcaggttggggatacattgacagttggaaaaaacaaatttgaatttgaaccactgccaaccttcactcctgaaatttttatgaaagtttctgctaagaatgtcatgaagcagaaatccttccacaaggggattgagcaactggtgcaagaaggtgctattcagctttataagaattaccaaacaggcgagtacatgctgggagctgttggtcaactccagtttgaagtctttaaacaccgcatggaaggcgagtacaatgcggaagtagtcatgagcccaatgggtaaaaagaccgttcgttggatcaagcctgaggacttggatgaacgaatgtcatcaagtcgaaatatcttggctaaagaccgttttgaccaaccagtcttcctctttgaaaatgactttgccctccgctggtttgcggataagtatccagacgtagagttggaagagaagatgtgactcagtaccaacaattggaactaaagttcctaattgttggacgctagtcgctatttggcgaactagctaactgcctcactaactgagttttacaaatggaatcgatttgtaaaactcagtgtcgtaatctaataataggtaaccgctatggcggcttacctaaacgcttcactaggaaaaatccacgaatggtatcgattcgtggacttttccgtcgtagatagaaaagggtaactgccttactaactccgtttgcaaatagactcgatttgcaaaacttcgtgtagtggataaaaatactgcaaagtttgcagtattttatctcagcattctataaacagatgttgaatattaagccttatttattttattattaacctttatggkaataactttmcaaataaaagaaaacttcagatattcaccttttgtgattggtctgaagttttcttttttactgtccatatttttggtaaaagtcaacttttacttggatgaaggttttggcctcgcgtaggagttgaagaagggtggcgcgggtttcaaattcttctcttgtcttgggtagactacggttccggaagacttccagatagcgttcaatttcatctagcaaatcagaagcaggattggtctggctcagttgagctgcaatttttgaaaagagttgggccaaaatcaggctctcactggcagctaggtgacaggtgttgatgtgctgggccatgtttcgcaggatacgactttgtcgctgtctcatctcaaagtagtggatatggtaatcagtctggtgaaagaggtggtcagagtgatccaaatagaccagtctgagggcttcttccaaaagggtgtccaattcttcaactaactgtgctcggttgcgtccatcccctctggataaataatatttgaagcgctggagaatatcttttaacttttcttctaccaatgtgtggtagtgatgaatttcctcttctcgtgaaggcatgtagagattaaccagtaaggcaaatcctgtaccgatagcaaagagaaggaattcattgactaggaggtctggagaggttgacttttgcaccaagagatggctaaccaaaacgctacttggtgtgatgccaatttcccagcccatcttgtaggctagaggcacatagagggctagatagaggccgaggctccagatatgaaatccgctcaagtgaaaagccagaactccgataaccaaagctagaagcatggaaaagaggcgatttcgggccagttttaaggtacttctacgggtatcggataggctcaagagggcgatgattccagccgagacagctgaggagagattgagaaagtaagcaagaaggcaggcaagacaggtagctaagatgagcttagtcgtacgttggctaatagacataaggatttcctagtaagttataataaaagcggaaaagacaagacctgagcaggcttgtctttatgagttattttttacgggctgctgcgtattcggcaacagcagtaaagaggacatctgttgaagagttaagggctgtttcacatgagtcttggatgaccccaatcacaaatccaaccccaacaacttgcatggcaatatcgttagaaataccaaaaaggctacaagcaactgggataagaaggagggatcctccggcaataccagaagcaccacaggctgagattgctgctactacactgaggacaaaggctgtggcaaagtcaacagggattccaagagtatttactgcagcaagggttaaaacgttaatagtaatcgctgcccctgccatgttgatagtagaaccaagtgggatagaaacagaataggtatctggatccagaccgaggtcgtggcaaagtttcatattgacagggatgttagccgcagaactacgagtgaagaaggctgtaacaccgctgacacgcaaacatttccaaacgaggggataagggtttctcttcataaagaggaaggcaatcaatggattgacaaccagagcgacaaagaacatagttgtcaccaagagggcaagcaagattccgtagttagctaggcttccgattcccttatcagagatggttttgaagacaagaccaaggataccaaatggagctagattgatgatccattcgacaatcttagaagtcacatcagccatagttttcagcaattctttactatttttgctggcctctctcatagcaatcccgaaaacaactgcccaagataagataccgatgtagttagcagtaacgagggcattgactggattgtcaaccagtttgagcaagagattgctgaggacctggccaattccatctggtggtgcgatttctgtattggcactatttaaggtaatctcaacagggacgatgaagcttgctaggacagcaacaagtgccgctgcaaaggttcccaccaagtaaaggaggataaccgttttcatgttgctatcttgacccttttgatgttgggaaagggcattggcaacgagggcaaagactagaataggtgcgatggctttgaggccaccaacaaagagatctccaagtaaaccaattcctgaaatgttaggaagtgtcagccctagggttcctcccataagcataccaatcaaaatccgtttgattaggcttgccttattccaagcatgaatgatttttttcataacaatctcctttggtgtgtaatgtttatgattatagtataaatatggagctaaaatcaagaattttctgtctattttggctattatttttgaatatttatggagattcatcacttgtgaaactatggtataataaatgaaaggagttttctatgcaagaatttattcaaacctacctcaataagcattgatataacaacgattattgagaatatcttaaccaagttaatttctctgttatttctatttttgctattctatatagctaagaaactacttcataccatggtgcagagaattgttaaaccttctttaaaaatgtctcgccacgatgtcgggcgtcagaaaaccatctcacgtttattagagaatgtgtttaattataccctctatttctttttactttactgtatcttgtctattttgggcttgccagtctctagtttgctggcaggtgctgggattgctggggtagctattggtatgggagcccaaggctttctgtctgatgtcatcaatggctttttcatcctctttgaacgtcaactggatgtgggagatgaggtcgttttgacaaatggtcctattaccgtatcgggcaaggttgtcagtgtcggcattcgaacaacgcaactcagaggagaagatcaggttctgcacttcgttcccaatcggaatatcaccgtcgtcagcaatttctcacgcacagactagacctgttattttaagtaatttgtggtacaatagaaagagtttaataaaggagaaaagatggttttagaaaagcagttgggcaatggttgtacctggatagaccttgatgtggataagattaaaaatatggaagatctttctgacatctatggattggacaaggaaaccattgagtatgctctggatagaaatgaacgagctcatatggattataaccgtgaaacggagacggtaacctttatttataatgttcttgatttagaaaaagacaaagaatattatgaagcgattcccatgacctttatcgtcgaaagacaacgaatgattaccatcagcaaccataagaatgcttatgtcattgatcagatgtcagcttatctggatagccatgagtcgctttctatttacaagtttctctttgctggtttagagattatcagtaacgcttattatcctgtcattgaagagatggataaaagtaaggacgaaattagtgccttgctacgtcaaactacaacaaagaaaaatctcttcgccctctctgacttggagactggtatggtttacttgacagcagcagcaaaacaaaatcgactcctcttggaacatatccagggccatgctctttatcggagatttaatgatgtcgaacgagagcagtttgatgatgccatgattgaagcccatcagttggtgtctatgacagacttgatttctcaagtcttgcaacaactctcagcttcttacaacaacatcctaaacaataacttgaatgatagtttgtcaattttgactattatctccgtcttactagcagtacttgcggttattacaggtttcttcggaatgaatgttcctctaccatttacagaagagccaaatgcttggatttatatcttaatgactagcttgattttatgggtggccttatctcaatggctgaagaaaattactagaaaataaaagaaaaggagccaaaatggtgattgaaaactacatgccagactttgctgtggaagcagtctatgatctgacagtcccaagcctgcaggcgcatggaatcaaggctgttttggtcgatttggacaataccctcattgcttggaacaaccctgacgggacgccagagatgaagcaatggctacatgatcttcgggacgcgggcattcgcatcattgtggtatcaaataacactaaaaaacgcgtccaacgagcagttgagaaatttgggattgactacgtttattgggctctgaagcccttcacatttgggattgaccgtgccatgaaggaatttcattatgagaaaagtgaagtggtcatggttggcgaccagctcatgacagatatacgagcagcccaccgtgcaggcattcgctcgattttagtcaaacccttggtccaacatgactcgatcaaaacgcagatcaaccgagctcgtgagcgccgtgtgaagcgaaaaatcactgaaaagtacggaccgattacatataaaaaaggaatttaactatggaagaaattctctgtattggttgtggagcaaccattcagacgacagataaggctggtcttggttttaccccccagtcggcacttgaaaaaggtttggaaactggcgaagtctattgccaacgctgtttccgtctccgccactataatgaaatcacggatgtccagttgacggacgatgatttcctcaagctcttgcacgaggtgggagacagtgatgccttggtagttaatgtcattgatatctttgattttaatggctctgttatcccaggcttgccacgttttgtctcgggcaatgatgtcctcttggtgggaaataaaaaagatatcttgcccaagtctgttaaaccaggcaagattagccagtggctcatggaacgtgcccacgaagaaggacttcgtccagtcgatgtcgtcttaacttcggcccaaaacaaacatgctattaaggaagtcattgacaagattgaacactaccgtaagggtcgtgatgtttatgtggtcggtgtgaccaacgttggaaaatcaactctaatcaatgctattatccaagaaattacgggtgatcagaatgtcatcacgacttcgcgcttcccagggacaaccttggacaaaatcgagattccgcttgatgacggttcttatatctacgatacaccagggattatccaccgtcaccagatggctcactacttgacggccaaaaacctcaagtatgtcagtcctaaaaaggaaatcaaacctaaaacctatcagctcaatcctgaacaaaccctgtttttaggaggtctcggacgttttgactttatatcaggagaaaaacaaggatttactgctttctttgacaatgaactcaaactccatcgtaccaaacttgaaggcgctagtgctttctacgataagcacgtcggaacccttctgacaccgccaaatagcaaggaaaaagaagattttccaaaattagtccagcatgtatttaatattaaggagaagactgacctagtcatctcaggcctaggctggatccgcgtaacaggaactgccaaagtcgccgtctgggcaccagaaggcgtcgccgtcgtcacacgaaaagcaattatttaaacacagaaaggaaagggttgtctaaattcgtgcgtgccctgagagcccacagcgaatacttttcactgtggtgtcagttggtacaagtgattgtaccaactgcggaaaatttgagaccttaggctcaaattttagtcatgaaagtccgaaggactttgctgacgtccgtcaccacttcagaaaagtataaaaagaaactcttttaagaaaattatgtcattaacatcaaaacaacgtgccttcctcaacagtcaggcacataccctcaaacctatcattcaaattgggaagaacggtctcaacgaccaaattaaaaccagcgtccgtcaagctcttgatgcgcgtgaattgatcaaggttactcttttgcaaaataccgatgaaaatatccacgaagtagctgaaatcttggaagaagaaattggtgtggatacagtccaaaaaattggccgtattttgattttgtataaacaatccagcaagaaagagaatcgcaagatttctaaaaaagtcaaagaaatatagaaaaactactccaaacaactgtttttacagagaaataaaggagactagcctatggcaatcgaactattgactccctttaccaaggtagagttggagccagaaatcaaggagaaaaaacgcaaacaagttgggattttaggggggaattttaaccctgttcacaatgcccatctcatcgttgcggaccaagtacgccagcagttgggactggatcaggttctgctcatgcctgaataccaacctcctcacgtagataaaaaagaaaccatccctgaacaccaccgtctcaagatgcttgaattggcaattgaggggattgacggcctagccattgaaaccattgagttggagcgcaagggcatttcttacacctatgacaccatgaaaattttgacagagcaacatccagatacggattattactttatcatcggtgctgacatggtggactatctgcctaagtggtaccgaattgatgaactggttgacatggttcagtttgtgggggttcagcgcccacgctacaaggctggaacttcttacccagttatctgggtggatgtgcctctcatggatatctcatccagcatggtgcgtgacttccttgcccaaggacggaaacccaactttctcctacctcagccagtgctagactacatcgagaaggaggggctttactgatgggctatcaagactatattaactgttcccgtgaggctttgttggaaaaaatggcagagcttctacccgagaaacgcttaacccattgcttgggtgtggagcgtgcagctatagaattggctcagagatttagagtcgataccgagaaagcaggactagcaggccttcttcatgactatgctaagaagttgtcagatcaggaattcttagacttgattgaccgttatcagctagaccctgacctcaaaaactggggcaataatgtctggcatggtatggtcggaatttataagattcaggaagatttggatttgcatgatttagaaatcttgcgagctattgaaatccatacagtcggggctgaccagatgacagacctagataaggttatctatgtcgcagactatatcgagcataatcgatcctttcctggagtggatgtagcgcgtgagattgcaagtttgtcacttaataaggcagtagcttatgagacagttcgtaccgtggagcatctagcccatcagggattccccatctatccccaaacccttgaaacctataacgcctttgtgcactatttgaaagaggactaaatgaacgaaaaagaattactagaactagtcgtgaaagcggctgatgagaaacgtgcggaggatattctcgcacttgacgtacaagaattgaccagtgtgacagactactttgtgatcactagctctatgaatagccgtcagttggatactatcgctgataatatccgtgaaaaagtagcggaagcaggatttaaaggcagtcatgtcgaaggcgacgcagctggaggttgggtcttgctggaccttggtgctgtcgttgtgcatgtcttttcagaagaaatgcgtgcccactataacctagaaaaactatggcatgaggcggattcagtagatttatctgaaactcttgcttagaagacgaactcagttgcagtcaactgggtttctttgcttattttagaaaaaatggatagaaaggtatagggctagtagtgtttaccatggagctcttggtatcatgattatggcaacttatgaaacctttgcggctgtttacgatgctgtgatggacgatggtttatatgacaaatggacggatttttctctgcgtcacttgcctaaaaacaaggagagaaagaaactcttggagctggcttgtgggacaggaattcaatctgtgcgcttctctcaggctggttttgatgtgactggacttgacttgagtggggatatgttgaagattgctgaaaagagagcggcttcggccaagcaaaagattgattttattgaaggcaatatgctggatttatccaaggcagggaaattcgactttgtcacgtgttattcggattctatctgctacatgcaggatgaagtggaagtgggggatgttttcaaagaagtttataatgccctcaatgatgatggtgtctttatctttgatgtgcattccacctaccagacagataaagtttttccagggctattcttaccatgaaaatgcggaagattttgccatgctctgggatacctacgaggacgaagcacctcactccatcgtgcatgagttgaccttttttatcaagkaggctgacggttcctttagtcgctacgatgaagtgcatgaggagcggacttatgagatcctgacctatgatattttgctggaacaggctggtttcaaatccttcaaactttatgcggactttgaggacaaagagcctacagaaactagcacccgttggttttttgtcgcgcagaagtaggagattatcatgaccatcacaggtattatcgcggagtttaatccctttcataatgggcataagtacctgctaaatcaggctgagggactgaaaatcgttgccatgtcagggaatttcatgcagcgtggagagcstgctatcgtggataagtggacacgagcccagatggcgctggaaaatgggagcggatctggtagtggaattgccctttttagtcagtgttcaggcggcggatttcttcggccaaggagctgtggatatcttggctaggttgggcattgatagcctcgcttttgggacggaggaagttctagattaccagaaaatcgctgacttatacacagagcaggggactgagatggagaaatttgtggaaaatttgcctgattccctttcctatccccagaaaacccaaaccatgtggaaggaatttgcaggtcttgatttttcaggcaatacgcccaatcatgttcttgctcttgcctatgccaaagccgttgttggacacaacaccaaactgcatccgattcagcgtcagggggcgggctaccattctgtagataaagatgtggactttgcttcggcgacagctcttcgtcagcaccagaaggatcaagatttcttagaacgctttatgccttctgttgccctctttgagcaggccagtaaggtgagctgggaagactattttcccttgctccgctatcaaatcttgtcaaatccagacctaaccactatctatcaggtcaatcaagaaatggctgcgcgcattaaggaagctattaaaacagcccagtctgtggaagaattggttgaggcggttgcgaccaagcgttataccaaggcgcgtgtcagacgccttttgacttatattttggtgcaggctagagaaaatgacttgccagaagacattcatgtccttggctttaccgaaaaaggcagacaacatctcaagtctctgaaagagcaggtccatctagtcagccgaattggcaaagaaccttgggatgctatgacccaaaaggcagaccagatttaccaactgggaaatccaagtatagcagagcagaattttgsaagagtaccgataagaatagaaacaaactcagtctactgaaaggtggactttttctcaagtctctactaaactactatttctaaatmacaagtttattttagcaaacgcgttccaaattccccaaaacatattctattttaggtttgtgaaaatcacttttttatggtagaatgtaaaagaatgtatgtcattcggaataacaataaaatgaggtaaaaacatggaaatcatgtcgcttgcgattgctgtttttgccgtcatcattggtttagtcattggatatgtcagcatctcagctaagatgaaatcatctcaggaagctgcggagttgatgcttttaaatgctgaacaagaagcaactaatttacgtggacaagctgagcgtgaagcggatttacttgttaatgaagccaaacgtgaaagcaagtctcttaaaaaagaagcactattggaggccaaagaagaagccagaaaataccgtgaagaagtggacgctgaattcaaatcagaacgtcaagaactcaaacaaatcgaaagtcgtttgacagagagagctaccagccttgaccgtaaggacgacaatttgacgagtaaggaacaaacacttgaacaaaaagaacaaagtatttctgatagagcgaaaaaccttgatgcgcgtgaagagcaattagaggaagtcgaaagacaaaaagaagcagaactagagcgtattggtgctctgtctcaggcagaagcacgagatattatcttggctcagacagaggaaaacttgaccaaggagattgctagccgtattcgcgaagctgagcaagaggtcaaggaacgttctgacaaaatggccaaggatatcctggttcaagctatgcaacgtattgctggtgaatatgtagcagagtcaacaaactcaacggttcacctgccagacgatactatgaagggacgcattattggtcgtgaaggccgtaatattcgtacctttgaaagtttgacaggggttgatgtgattatcgacgatacaccagaagtggtaaccttgtcaggatttgatccgattcgtcgtgagattgcccgtatgaccatggaaatgttgctcaaagatggtcgtatccacccagctcgtatcgaagagttggttgagaaaaaccgtcaagagattgacaataagatccgtgaatacggtgaggctgctgcctatgaaattggtgcgccaaaccttcatccagacttgatgaagattatgggacgtttgcagttccgtacttcttatggacaaaatgtcttgcgtcattcgattgaggttgctaagttggctggtatcatggcgagcgaacttggtgaaaatgcggctcttgcccgtcgtgctggattccttcacgatatcggaaaagccattgaccgtgaggttgagggtagccacgttgaaatcggtatggaattggcccgtaagtacaaggaacatccagttgtggtcaataccattgctagccaccacggagatgttgaagctgagagcgtgattgcagttatcgttgctgcagcagacgctttgagcgcagctcgtccaggtgctcgtagtgagtctcttgaaagctacatcaagcgtctccatgatttggaagaaattgctaacggctttgaaggggtacaaaatagctttgcccttcaagcaggacgtgaaatccgcatcatggtcaatccaggacaaatcaaggacgacaaagtcacaatcttagctcataaagttcgtgagaaaattgaaaacaatctcgattacccaggaaatatcaaggtaaccgtgattcgcgagcttcgtgcagtagattatgctaaatamataagaaagagcagttgaaaaattactgcttttttgttacactagatagaaagactgtaaaggataatttggctttttgccgttattctagagaaatgttatttcacagactgactaaaaggagacacaatggcagaccgaggcttactaatcgttttttctggtccttcaggggttggaaaaggaacggttagaagagagatttttgagagttctgaaaatcaatttcaatactctgtatcgatgacgacgcgcgcacaacgtcctggagaagtggatggtgttgactatttcttccgcactcgcgaagagtttgaagagctgattcgtcaaggacagatgttggaatatgcagaatatgtcggcaactactatggaactcctctgacctatgtcaatgaaaccttggacaagggaatcgatgttttccttgaaattgaggttcaaggagctcttcaggtcaagaaaaaggttccagatgctgtctttatcttcctgacaccaccagatttggatgaattgcaagatcgtttggtaggacgtggaacagacagtgcagaagtgattgcccaacgaatcgaaaaagccaaggaagaaattgcgcttatgcgtgagtatgattatacgattgtcaacgatcaggtgcccctagctgctgagcgtgtcaaacgtgtgatcgaagcagaacacttccgtgtggatcgtgtcattggtcactatcaggagatgttaccaaagtctccaactactcgataaaatttagaaaataggtacaagcaaatgatgttaaaaccctctattgataccttgctcgacaaggttccttcaaaatattcactcgtaatcttggaagcaaaacgtgcccacgaattggaagcaggtgcaccaacaactcaaggtttcaagtctgaaaaatcaactcttcgcgctttagaagaaatcgaatcaggaaacgttacaattcacccagatccagaaggaaaacgtgaagcagtgcgtcgccgtatcgaagaagaaaaacgtcgcaaagaagaagaagaaaagaaaatcaaagagcaaatcgctaaagaaaaagaagatggtgaaaaaatttaaggttggggggactcaatcttattttttctattgcaagaatgtactgacaaggaggaggtgagaagatgcccatagccaagattattgtagatgtgcccttgatgcagacggaccagccctatagttacaggattcctgaggaatttctgggaatgctggaagttgggatgcgagttcatgtgccttttggtaagggaaatcgcctgattcaagggattgttcttggtttggagtcccaattggatgaagaagagatggagcaagatttaaaagatattgccgaggtactggatttttcccctgttctcacgcaagaacaactctggctggctgaggagctccgtaaatccgtcttttcctataaaatttctatcctcaaggctatgttaccagggtttctgaactctagctatgacaaaattctctatcctatggcaggtctgagtcaggaagaccgagagcgcttgtttggttcagaagattcgcttgccttttcttctctagatttaggtaagcaagctgaaatgatgcgtttgactagaaaaggcctgcttggtctagaatatcaggcgattgatcaaaagaaggtcaagacccagtcttggtatgaggtagaccttgttcagttagaaggtgtagagatttctacacgcgccaagaaaaagttagaactgagagactatctgctgtctcatccagagagcgcttctttggctagtttgttagagtcctactcgcgggagcaagtcaacttctttgtggaacaaggtgctgtgaccatagttcaaaaggaagttcaacgctcggctgcttattttgaagggattgaagcaagtcagcctttagagttgaatccagagcaaagacaggcgcgtgatgcggttgtcagtgcgattggcagtcatcagcctcctttcctccttcaagggattacaggaagtgggaagacggaggtttatttgcagattatccaaggagccttggacaagggcaagacagctattttgctggtgcctgagatttccttgactccacaaatgacggagcgttttattgctcgatttggtgagaaagtggccattcttcattcaggcctatccaatggtgaaaagtacgacgaatggcgcaaggtggaacgtggcgatgctcaagttgttgtgggtgccagatctgccatctttgctccgctgaaaaatctaggtgtcattataatcgatgaggagcatgaagcgacttataagcaggacagcaatccccgttaccatgctagagaggtagctattttacgggcccagtataatcaagcagcactggtacttggttcagcaactcctagtctggaaagccgtgctcgggctggaaaargcgtttatcaacatttacgtctgacccagcgcgccaatcctttagctaggatccctgaggttcaagtaattgactttcgggactatatcggacaaaatgaaacgtcaaactttacgccacctttgctagaagcgattcaggatcgtctggctaaaaaagagcaggtggttcttatgctcaatcgtcgtggttattctagctttgttatgtgtcgggagtgtgggaccgtggatacttgtcctaactgtgacatttccttgaccttgcacatggataccaagaccatgaactgccattattgtggtttttcgaaggacattcctcaggtctgtcctaactgtaagagccgaagtattcgttactatgggacagggacacagaaggcttatgatgagctggcagaactctttccgcaggcccgcattttgcggatggatgtggacacgactcgtaagaaaggtagtcaccaagctcttcttgaccagtttgggcgaggagaagcagatattttactaggtactcagatgattgccaagggattggattttcctaatgtaaccttagttggagttctcaatgcggatacggcattgaatctacctgatttccgttcttctgagagaaccttccagctcttgactcaggttgcaggccgggcaggtcgtgctgaaaaagctgggcaggtcttgattcagtcttacaatcctcagcactacgctattcgatttgcaaaggatcaggattacgaaggtttttatgcctatgaaatgggaatcagacgacaacttggttatccgccttactatttcactattggcattaccctttctcacaagaaagaagaagaggtggtcaaacgtgcttatgaagttatgaatattttgcggtcaggattgtcagagaccagtaacattcttgggccaacccccaaaccgattgctcgtacccacaacctctatcattaccagattttgattaaataccgtttagaagatgagctaagtccgaccctcaaccaggtcttagccttgactcaagaacgggaaaatagtgagctccgtctcagcattgaccatgagccacagcaatttttataagaaggagaagatatgacaaaattaatctttatggggacacccgacttttcagcaacagtcttaaaaggacttttgacagatgaccgttacgaaattctagccgttgtgacccagccggaccgtgctgttgggcgaaaaaaagtgattcaagaaaccccagtcaagcaggctgccaaggaagcagggcttcctatttatcaacctgaaaaattatctggaagtcctgagatggaagctattatgaagctaggagcagatggaattgtgactgctgcttttgggcagtttctgccaagtaaactccttgatagcatggactttgcggtcaatgttcacgcttcccttcttcccaaacaccgtggtggtgcgcctatccattatgccttgattcaaggggatgaggaagctggtgtgaccatcatggaaatggtgaaggaaatggatgcaggagatatgatttctcgtcgcagtattccaatcacggatgaggacaatgtcggcaccttgtttgagaaattggcgctagttggtcgtgatttgcttttggacactttgcctgcctacattgctggggaaatcaaacctgaaccgcaggatccaagtcaggtcactttctcgctaaatatcaagccagaggaagaaaaactggactggaacaaaaccaatcgtcaactctttaaccaaatccgtggcatgaacccctggcctgttgcccatactttccttaagggcgaccgctttaagatttatgaagcactaccagtagaaggtcagggaaatccaggtgagattctctctactggtaagaaagaattgattgtcgcaacggcagaaggggctctatccctcaaacaagtgcagccagctggtaaacctaagatggacattgcttccttcctcaatggagttggacgtacattgactgtaggagaacgatttggtgactaaagtagaaacggctagaagtttagccctagcagtattagaggatgtttttatcaatcaagcatactcaaatatcgccttaaataagcatttcaagggaagtcaactttcggcagcagacaagggcttggtgaccgagctggtctatggaacggtagcccgtaaactgactctggaatggtacctatcccactttatcgaagacagagaccagttagatagttggctttatgtccttcttctcatgagtgcttaccagctccgctatttggacaagattccagaccatgctgtggtcaatgaagcagtagaattggccaaagtccgtaaaaaaggcagtgaaaaattggtcaacgctgtccttcgccgtatcttgcgtgaaggctggccagatattgctagcatcaagcgaaaaaacaagcgtgattctattgcctattctcttccagtttggctagttgccaagctcaaggaagaatacggagaagagcgagctcaagctatctttgaaagccttttggtgcgcaacaaggctagtattcgtgtaacggacctaggacgaaaagaagaaatccaagtcttgttggaggccagtgattcacctttgtctgtttttggtctcgtcaaggagcaggggcattttgcaggccatgacctattttcagagggggctattactatccaagacgagtctagtcagctggttgctcccactcttgatttacaaggtggtgagcaggttctagatgcctgtgcggctccaggtgggaaaacagcccatatagcctcttatctaacgacaggtcaggttactgctctggacttgtacgaccataagttggacttaatacaagaaaatgcccaacgtttgggagttgcagatcgggttcaaatgcaaaaattagatgccagaaaggtgcatgagttttttggtcaggattcatttgataagattttggtagatgctccctgttcaggaatcggtcttctgcgccgaaaaccagacatcaaatacaataaagaaacggcagatttcgcgtccttgcaggaaattcagctagaaatattaggtagtgtttgtcaaacactacgcaaaggtggtataataacttatagtacctgtactattgtctcagaggagaactttcaagtcgtacaggcatttttagaaagtcatcctgaatttgagcaggttacactagaacatgaatgtaaggatatcatgaaagacggctgtatcctcattacacctgaattgtatggaagtgatggattttttatcagtcaatttcgtaagatatcggattaggaaggaactaacacatggaaatttcattattaacagatgttggtcagaaacgaacaaataaccaagactatgtcaaccactatgtcaatagagctggacgtactatgattatcctagctgatggtatgggaggtcatcgcgcagggaatatcgctagtgaaatggcggtaacagacctaggtgtagcttgggtagatactcaaatcgatacagttaatgaagtacgtgaatggtttgctaacaaccttgagattgaaaatcaaaggattaaccaattgggacaaaatgaagcctataaaggaatgggaacaacccttgaggctgtagccattattgataatcaggctatctatgcccacattggggattctcgtatcggtttgattcgtggagaagaataccaccagttaacgagcgaccattctttggtcaatgaattgcttaaggcaggtcaattgacacctgaagaagctgctagccatccacagaaaaatattattacccagtcaatcggtcaaaaagacgaaattcagcctgattttggaatgatcacccttgagccgggagactatctcttactcaatagtgatggcttgacaaatatgatttcaggcagtgagatttctgatattgtaaccagcgatatttctttggcagataaggcagcaaccttgatccgttttgccaacaatgcgggtggtttagacaacatcacagttgcccttattgctgttaatgaggaggaaacagaatgatccaaatcggcaagatttttgccgggcggtatcggattctcaaacagattggtcgaggaggcatggcagatgtttacttggctaaagatttgattctagacggggaagaagtggcagtaaaggtcctgagaaccaactaccagacagacccgattgctgtggcgcgtttccagcgggaagcgagagccatggcggatctggaccatcctcatatcgttcggattacagatatcggtgaagaagagggacaacagtatcttgcaatggaatatgttgctggattagacctcaaacgctatatcaaggaacatcaccctctttcaaatgaagaagcggttcgaatcatgggacaaatcctcttggctatgcgcttagcccatactcgaggaattgttcacagggatttgaaaccgcaaaatatccttttgaccccagatgggactgccaaggttacagactttgggattgcagtagcctttgcagagacgagtttgactcagaccaactcaatgctgggttccgttcattatttatcgccagagcaggcgcgtggttctaaagcaactgtgcagagtgatatctatgccatggggattattttctatgagatgctgacaggtcatattccttacgatggggatagtgcggtaaccatcgccctccagcatttccagaaacctctgccgtcggttatagctgaaaatccatctgtgcctcaggcattagaaaatgttgttatcaaggcaactgctaagaaattaacagatcgttacaaatcagtcgctgaaatgtatgtggatttgtcgagtagtttgtcttataatcgtcgtaatgaaccaaagctagtctttgacgatgcaactaaggcagatactaaaactcttcctaaagtaccgcaaagtaccttgacttctattcctaaagctccggtacaagagggaagacctcaacctaagccccaacctcatcagacagaaaaaacagtacctagttcaaagccaaccaaacgtcgtcgtatgaaagcacgttatccaattttatttgcgaccttcttgttggttgtggcatccttggtatggattttatatagaacgcccgctaccattgctattccaaatgtggcaggtcagacggttgcagaggctaaagaggctctaaaaaaagccaattttgaggttggtgaagaaaaatcagagtccagtgataaggttgaagaaggtcgggttattcgtacagaccctgaagctggtaaaacacgtaaagaaggaacaaaaattaatttgattgtgtcttctggtcagcagtctttccaactcggaaattatctcggaagaaagtccagtgatgtagtggcagaattgaagggtaagaaggttccagaaaatctgattaagattgaggaagaagaatccaacgaaatcgaagccggtacaatcatgaaacaaagtttaccggagggaacaacctatgatcttagcaaggcaactcaaatagttttgacagttgctaaaaaagtaaattctatttcaatgccaagctatattggttctagccgagaatttgcagtcaataatcttacagagatatatgacattaaaaaagctaatatcgaagttgtagaagtgtctaaagctcctgaaggaactgctgaggggactgttatagagcaaagtccaaaagcaggcgaaaaagtagacttgagcactactcgtgttaaaatttctatttataaacccaaaacaccaccatcaagttcctcttcaacgtcagttcaacgtggtaaccaaggttcacctactactccaaatcaagggaatcaacaaggtggccagcaaggaaatcaacaaggaacggttcctactccgagtcaaccaaatagtgaaggaaatcacgaaaattctcgtgattaaacgaatctttgtcatgatttcatggcaaagattttttttgactccggatttgtgatagaatagtaggagttgataaaaggaggaacgcatggaagaatcaagagaattaaatgccgtcatcgatgtgattatgttagcaggaaccattctccttaaaagtggttcagagattcatcgtgtagaagataccatgattcgtattgcgcattcgcagggaattttggattgcaatgttctggctatgcctgccgcaatctttttctccattgaaaataccaatatttcgcgaatgaaacgcgtgacctcctcttcttataatattgaaaaagtctgcgatgtcaaccagatttctcgtcagttggtaggggggcagattgatttagagacagcgttcaagcaattgaaggctttgcaagcccaacctcttccttatactaagttgcaggtaactctggctgcgacctttagtgctcctttcttttcaattatgtttagtggaaatatctacgacgcacttggggcaggagtggctaccttatttggttttgccttttccctctatgtagagaagtttatccgaattccctttgtgacagcatttgctggagcctttgtctttgggatgatagcccagttttgggctcgctacacaggttttccttcaacggcagatttgattatagctggtgcggtcatgccgtttgtaccaggtattgccttgaccaatgcggttcgtgatattatgaccaaccacataaactctggtatgagtaagatgtttgaatccctgctcattacccttgctttaggggcgggaacttctgtcgccttggtattgatgaactaatatgacactaacaacctttttattacaagcagtagcaagtcttcttgctataatcacttttttaatcgtactcaatgttcaacgttctatgctcttaccaggaggaattttgggcatggctgtctggctaatttatcttttgctcaaggaaccgaccaatgttattgtggctacttttattgcagccattatcggttcttgtgtcagccagattttaagtattctttataagacacctgctgtagtctttatcttggcaatcttggcacctctggttccgggttatctctcctatcggacaactgccttttttgtgacgggagattacagtcatgccattgctagtgcaaccttggttgttatgttggctttggtgatttccattggaatggctagcggaacagtgattcttagactgtattcttacttacgaaaacagcataatcgttagactaacaagagacttgatttggtgaatcaagtcttttttctctcttttactgctatttgtgataaaatagtatagaacgattttttacaatgaatgataaaacagaggtaaatatgacaatcggtattgataagattggttttgcgaccggtcaatatgtcttgaaattacaagacttagcagaagcgaggggaattgaccctgaaaaattaagtaaaggactcttactcaaggaattgagtattgcgcccctaactgaggatatcgtgaccttggcggccagtgcaagtgattctattttaacggagcaagaaagagcagaaattgatatggtcattgtagctactgagtcaggaattgaccaaagtaaagctgcagccgtctttgtgcatggtttgctgggcatccagccctttgctcgtagtttcgagattaaagaagcctgctatggagcgacagctgcccttcattatgccaaattgcatgtggaaaattctccagagtccaaagttttggttattgccagtgatattgccaaatatggtattgaaacacctggagaacccactcagggtgctggaagtgtggctatgttgattacacagaatccacgcattatggcctttaataatgacaatgtagctcagactcgtgacatcatggatttctggcgtccaaattactcaacaaccccttatgtaaatggtgtctattctacccagcaatatctagatagtttgaaaacgacttggcttgaataccaaaaacgctaccagcttaccttagatgattttgctgcggtttgcttccacttgccttatcctaaattagcgctaaaaggcttgaaaaaaatcatggataagagcctgccgcaagagaaaaaagacctcttgcaaaagcattttgaccagtctattctctacagtcaaaaggtgggaaatatctatacaggttccctcttcctcggactcttgtctctcttggaaaatacagatagcttgaaggctggggataaaattgccctttatagttacggaagtggggctgtagctgagttctttagcggtgaattggttgaaggatatgaagcttatctggataaggaccgtttgaacaagctcaaccaacgaactgccctgtctgttgcagactatgaaaaagtcttctttgaggaagtagagttagacgaaacaaattctgcccagtttgctggctatgaaaatcaagattttgccttggttgaaattgttgaccaccaacgccgttatagcaaggttgaaaaataatgaagataagttggaatggattttctaaaaaatcataccaagagcgcctcgagctgttaaaagctcaggcgctccttagtcctgagaagcaagtgagtttggagcaggatgaacagattagtgtgactgtggcagaccagctgagtgagaatgtagtgggaactttttctctgccttattcgctggtcccagaggttctcgttaacggtcaggaatacacagttccctatgtgacagaagaaccctcagtggttgctgcggccagctatgccagtaaaatcatcaagcgagcaggcggttttattgcccaagtccatgagcgccagatgattgggcaggtagctctttatcaagttgctaatcctgaacaagcgcaagagaaaattgccagcaagaaagccgaactcttggaacttgccaatcaagcctatccttctatcgttaaacgtggaggtggggcgcgtgatttgcatgtagagcagatcaaaggtgaaacagactttctcgttgtttatctccatgtcgatacccaggaagctatgggagctaatatgctcaacaccatgctggaagccttgaaaccagtcttagaagaactcagtcagggacagagtctcatgggaatcctgtctaattacgcgaccgattctctggtgactgcaagctgtcgtatcgcctttcgatacttgagccgccaaaaggatcaaggacgagaaattgcggagaagatagccttggctagtcagtttgcgcaggctgatacttaccgagctgctactcataataaagggatttttaatggtatagatgccattttaatagccactggtaatgactggcgtgctattgaagcaggggctcatgtctttgccagtcgagatggacgctatcaaggtcttagtcaatggacgctggaccttgaaagagaagaattggtcggtgagatgaccctgcctatgcctgtagcgacaaagggtggctctatcggtctcaaccctcgtgtagccctcagtcatgaactactgggaaatccatctgctaaagaattagctcagcttatcgtgtctatcggtcttgcccaaaactttgcggctctcaaagccttggtgagcacagggattcagcaagggcacatgaaattgcaggccaaatccttggctctcctagcaggtgccagtgaatctgaagttgctcccctagtcgagcaacttatcgcagataaaacctttaaccttgagacagcccagcgctatctcgaaaatttaagattataaaaaactcagacgaattggtctgagttttcttgtgcttatactcaatgaaaatcaaagagcgaactaggaagctagccgcaagctgtacttgagtacggtaaggcgacgctgacgtggtttgaagagattttcgaagagtattaaatactttttccaggtaatagggtaactggtaagaagtagcctgttgtcgcaacttccttaccttcgatcttctgcaagagaagatcaacagtgaggcaggcaatctcttgcaaaggttgcttaattgttgtcaaatgagggtagtagttctcgataaaataggtcccatcgtagccgatgactttgagctcttcaggaacagaaatgcctagttcttgagcaattttaatgaccagaatagctgtcaaatcatctgaagcaaaaatggcatctggtttttgacgagtcaagatattcttgatttccatttcttttctgacgggagaaaagtcactggaaatattgataataggcgcttttgggagtacggatgcaaaaccagcgtggcgcagtccggttggcgaattggaattgtcattccctgtaatcatgatgatagactgggcgcctgtcttaaccaaggtctgggcagcaagaaccccaccagcgtagttgtcagaggaaacgacagggatgtctggagataggtttcggtcgaaggaaataatcggcgctgtcacgcgattgtagtcttcaattcccaagttgtgactacccgaaatgatgccgtccacctgattggcttccaacatttcgatgtattcgcgttccttttcagaatcgtgctcactgttgcagatgatggtcttataaccatttttgaagagttggtgctccagcttatcaatcaattctgcatagaaaacattggaaatattggggaaaatcaagccgattaacttagctgattttccttgcagactacgagccaggttgttgggtttatagcccaattctcgcatggcttcattgaccttttgaatggttttctcagatagataaccttttttattgataacccgagaaacggtagtagggctgacgcctgcaagtttggcgacatcagttagttttgcgaccataatctaattcatagtaagttccagttgggtttccagatttgatgaggataccattttggtccgcatgtgggaagacacgaccagaaaatactttttctcctttattgatgaaaatttcaaagacagagttatcaatgaaaattgtagcagtagtagcctgattatcgatagggcaagagcgagttgtcccaaattcttgggcatactgttcaccagcctggctacgatctactgtcacttgaccatttgcaaggtcaaagttgatggaaagtcccttgccttctttatcagcaagtaagacaatctcgctctggctattaggttccaagttgagttcaagttcgtagctgttattggtttggggacggtttgagaaggcttcttcagaagcacgaaggtccttgatagtcgcgactgggtattggtagagtttgccatctttgatagttagttctttgaccaaagagaaggttccttggtggtcaaaacggtcagatgggtaagaaacatctggcaaaccaagccagctaacagctagagcacgtccatcaggagcgttgaatgcttgggttgcataggcttcaaaaccaaaatccatattttggagttgagacacatctaccattttggcattttcagggtcaaaggaagccccaattttatacatatttggatagatattatcgtagtctagaacatctttatccaatccttgtgggcagtagagaaggacaggttgctctcctacaaagaccagatttgggcattccatcatgtaggcagtgcggtcgttagcaaagtcaaggtcgccaacagcttgccagtttgtatagtcgttgtcaacagccttgtagagacgaacgaagccttttttctccaaatcctgtcctccgacgatagcataatattgacctttaaaattaaaaatttgcggatcgcggaagtggtctgtagagtctgctggctggtcgattaagatcttgtcaatcttcgtaatattgccatccttatccatcaaagccccgatctggtatgggtgacgaatccagttttcatcacggacatttcctgtatagaataggaacaagttatcgctaaattgcatagcagaaccagagtaggcaccgtggctatctaatggagtatcaggcaaaactttgacaccagtttctgtgaagtgaaccaagtcctcactttccaattgcacccaagatttcaaaccgtgggctgcaccgaaaggaaagttctgataaaaaataatccactttccatcaaagtaagaaaagccatttgggtcgtttaggagtcctgtttttggctcaacatggtaatgagtatgccatggagattgtgccatattttccttaatattcttaatttcttcttgcgtccagtcttgataaagtctgtaacgacgctcagtagtccattccattcattcattcctccaaaaatcttatcacatttaatagtaaccgttttcgataaaaaatgcaagccttttatgttaaaaaagagaaaaaactgttaaacgtttatcataaatttaaagcaggaaattaatcaacttttcaagaaaatatgaaagataatgaaacaaaagccttttaactaagatttcaaacttgttttttaaggaattcctgctaaaacagtcaaaatcaatcaatctaaagcgagcttactaagtggatagaatattttttctgcaaaacgcttgacatatttctaaaacatgataaaataatagtcgtaagggcggataaaatcgctttcaaacaagaacaaaattttatataaggagatttttgcaaatgaacaatcaggaaattgcaaaaaaagtcatcgatgccttgggcggacgtgaaaatgtcaacagtgttgcccactgtgcgactcgtcttcgtgtcatggtcaaagatgaaggaaaaatcaataaagaagtgattgaaaacttggaaaaagttcaaggtgctttctttaactcaggtcaataccaaatcatctttggtacaggtacagttaacaaaatgtacgatgaagttgttgcacttggtttgccaacatcatctaaagatgacatgaaagcagaagctgctaaacaagggaactggttccaacgtgctatccgtactttcggtgacgttttcgttccaatcatcccagttatcgtagcgacaggtctctttatgggtgtgcgtggtctcttgactgctcttggaatgacacttccagctgatgtgacaacttacactcaaatcttgacagatacagcctttatcatcttgccaggtttggttgtgtggtcaaccttccgtgtattcggtggaaatccagccgttggtatcgttcttggtatgatgcttgtttctggctcacttccaaacgcttgggcagtcgcttcaggtggtgaagtaacagctatgaacttctttggtttcatccctgttgttggtttgcaaggttccgttcttccagccttcatcatcggggttgtcggagctaaatttgaaaaagctgtccgcaaggttgttccagatgtgattgacctcttagtaacgccattcgtgacacttttggttatgtctatccttggactctttgtcatcggaccagtcttccacgtcgttgaaaactacatccttatcgctacaaaagcgatcctcagcttgccatttggtcttggtggtttcttgatcggtggggttcaccaattgatcgtcgtatcaggtgtgcaccacatcttcaacttgcttgaaattcaattgcttgctgctgaccatgctaacccattcaacgctatcatcacagctgctatgacagctcaaggtgctgcgactgttgcggttggtgttaaaactaaaaatccaaaactaaaaacacttgctttcccagctgctctttctgccttcctcggtattacagagcctgctattttcggggtgaacttgcgcttccgtaagccattcttcctttcattgattgctggtgcaatcggtggtggattggcttctatccttggacttgctggtactggtaatggtatcaccatcatccctggtacaatgctttacatcggtaacggacaacttgcacaataccttcttatggtagctgtatcattcgttcttggtttcgctcttacttatatgtttggttatgaggatgaaaaagaagttgctactgaagtagagacagaacgtttggttcaagaagaaacaactggtaacattccagcagctcttcaaaatgaaacacttgtaactcctattgtcggtgatgttgtagctcttgctgatgtcaatgacccagtcttctcaagcggagctatgggccaaggtatcgctgtgaaaccaagtcaaggtgtagtatatgcaccagctgatgctgaagtctcaattgcctttccaacaggacacgcttttggtttgaaaacaactgatggtgctgaagttttgatccacgttggtatcgacactgtaacaatgaacggtgaaggttttgaagcaaaagttgcccaaggtgataaggttaaagctggcgatgttcttggaacatttgactcaaacaaaatcgctgcagctggacttgatgatacaacaatggttatcgttacaaatacagctgactacgcttcagtagctccagtcgcaacaggttcagttgctaagggggatgctgttattgaagtgaaaatctaatactcttcgaaaatcaaattcaaaccatgtcagcttcgccttgccgtagatatatgtaactgactttgtcagtcttatctacaacctcaaagcattgctttgagcaaccttcggctagcttcctagtttgctctttgattttcattgagtacaatattccctctcaaaatgaaaacgaacaaatgacatgtttgttcgtttttgcttgaatggtaagatttacagaggaaaatctaaaaaatagagaaatttagcctttcgaaatatgctataataaagaaaataaaaacaagaggtttatcatgacaaaattatatggaagcttggaagcgggcggtacaaagtttgtctgtgctgtcggtgatgaaaactttaacgttgtagaaaaaacacaatttccaacgacaactccaatcgaaacaatcgataaaaccatcgagttcttctcaaaattcgataaccttgctggtcttgcagttggttcatttggtccgattgatattgataaaaactcaaaaacttatggctttatcacgacgactccaaaaccaaactgggcaaatgtggacttgcttggtgcccttcgtcgcgccctcaacgtgccaatgtacttcactacagacgtaaacagctctgcttatggtgaagtggttgcccgtaacaatgctggtggccgtatcgaaaacttggtttactacacaatcggtacaggtatcggtgcaggtgttatccaacgtggtgagtttatcggtggtgtgggtcaccctgaaatgggtcattattatgttgctagacacccaatggatattgaaaaagagtttaagggtgtttgtcctttccataagggatgtctggaaggctatgcagctggtccaagtttggaagctcgtacaggtgtacgtggggaaaatattgaactcaataaccctgtttgggatgttcaagcctactatatcgctcaagctgcggttaatgcgacagtgactttccgtccagacgtgattgtctttggtggaggggtcatggctcaacaacacatgctggaccgtgtccgtgagaaatttacatctcttcttaatggctacctaccagttccagatgtgcgtgaatacatcgtcactccagcagtcgcaggaaatggttctgctactcttggaaactttgttcttgcaaaagaagtttcaaaataaagcacaaaatccgcttgggaaaccaaacggattttttacatgtcaaagcatttgccagaaaaagtcgataatataggtcagaccgtaggtataaaccacgagagtaaagggcttggtcagaatgatgatagtcatatagcgcttgaagctcatcttggtcagggcagccagcatacagagaaagtcagctggactaatgggccaaatcatcataaaaataaagaaacggtcaaaacgattacccttatccaaccaaccgatgtacttgtcataggtgcgcttgctgacgacagactggacaaaggcagccccatagaggcgcaccagataaaagataatggcacagccaatcacgatgccgatatagttgtagatagtcccgatgatgtgcccgtatataaagactccagccaccgaggtcaaggcccctgggatgatagggacgaccgtttgtaaaatctgtaaaaagataaagagaggtggcccccagatacctgcctgctggataaaggcagagagggtttctttagactgtaaaatcccagcctgataagcccaaatacagaaaagcaaactcccaactccacctacaatcgatgagatattgataacttgctgtaaaaggggagaaactgctttcatttgtttatcctgtgacatgtaaactcctcatagatagtataactctactataccatattttggaggagaaagggggaatgagtctttttgctatgggaagagtgatggaatttgaggctaaacatgctataatagacctagtataaaatttggaaatttcaggatatgaatagttcaaatgaaacgtaaggaaggtttgcgatggcaagacgaaaagatttttctgaattaacaagagtacaaatcccagcagctctgcatttgatgcgaatgggttatacctatctttctcgtaatagtaaagaaattgaagaaagagatccagataccaatattcttgtatctgtttttaaagagcaatttttaacgtttaataactatttaacagatgaagattttgagagagaattggccaatatcaagctggaactggatcaaaatgatttagggcgctccttctttaaaaggatacagggacaagaaggtgctgtttatatcgattgggaaaatcctgaagccaacatcttccatctggcgcttgaagtcacttgtcaaaatgggcaagatgaatttcgcccggatatagttgtgtttatcaatggacttcccctttcttatatcgaagttaaacaacccaatgctatccgtgatggaaagacagggattcagtcagaacaggacagaaccagataccgttttgaaaatcgtaagttccgtcgttttaacaatattactcaattgatagctctatcagataatttaccttatatcagtggccaaggtcaacaaaaacagggttcttactacggttcaaatgcctattcaaaaaccaagtttaatgctttcaaggaagaaagagaagtagattttctgaattcaattgtacctttaagagatgaacaaattgatttcgtacttgaggatgtgaagcgttttgctctcaaatctcaaccagaatttacaacaaatttacagcccgagactccttgcaatacttttctatcatctttgtatcaaaaagaacgcctgcttttcatgcttcgctttgggctggtctatgtagaagaagaaagcaagggaggtcagatgcaattgcagaagcatgttatgcgctatccgcagtattttgcaactcgtgctatcgaagagactatcgcaagaggtatcaagaagggcgttatctggcatacacagggctcaggtaagacggccttagctttctttaatatccgctatctgaccaattatttctcaaaacagggcattgtccctcagttttactttgttgttgatcgcttggatttggcagaccaagcctttaaggaatttaccaaaagaggtctaaaagttaagcgcatcaacaatcctcgagaactcaatcaaaaacaagatggttatgatgtcgctgttgtcaatattcagaagttcaaagatgattcagacctgaccgaccgctctggctatgatctcaatcgtcaaaatatttactttatcgatgaagctcatcgctcttataacgaacgaggttcctacctgccaaatctataccaagccgatactaatgcgatcaagattgcattgactgggacccccttgattacctataagaaagatggtaagaccaaggaaagccatgcgactacacgtgatatttttggggattatattcataaatactactacaaccagtctatagatgatggttttaccttgcgtttgatgcgagaagatattgagacgtcctataaagataatctcagagccataaatgaagaaatccaacgtggggatttatcaaaagaagatatctttgctcatccgcactatgtggaacctatgcttgattttattctggaggactttaatcgtgcgcgtgatctggtttttgatgaccagactattggtggtatgattgtctgtgattcgtccaagcaggcgcgtgagcttgaaaaacagttagaagaacgacgaaaggctggaacaaccaacttgacctctgctctcatcctccatgatgagggagacaaggaagagaaaaaggaaaaggtggatgcctataaagaaggtaagattgacctcattatcgtctattcgatgctcctgacaggttttgatgcgcctcgcctcaagcgtctctatctaggtcgcaagattaaggctcataaccttctccagactttgactcgtgtgaatcgtccttacaaggactatctctttggctatgtagttgattttgcggatatttctaaagaatttgacaagactaatcgtgcttatttggaagaactcaatcaagaatatgatacgatcctgactggggaaaatggagaggatgtgtttgggtcgctctttgtgccagcagaggaaatttctcaggaactaagcaagacagagcgcatcctcatggactatccaacctctaatctagagttcttttctcaatcaattgatgatatcaaggatagaaagcaactaaatgaactacgaaaagccttagaatcggttaagcagtactataatatcgcccgcttactcggttatgaccatttgattaagcagattgatattgctcagattgcaactctgctcaatgtcatctcaagacgtttgctgaccttgtccctgatagataagccagatgacttttctagtcgcactcttttaaatcttgccatgtctgagaccagttttagttttgtcaagattgcggaggaagaactccgtctagcagccaatgacctagaaaatttgaagcgtcgagttgctggaggcatcataaaacagcgtgatgagaaagatcctgagtgggtttttctctacgaagaattccagcgcatcatgaaaaaacacttaatatatggacaagaaggctacactatggaaaacatcaaagaaattcaaaaagagtatgaagacctctttaggtcagtggaaaatcatcgtactcatatgagacgtttgacaatgaattttggcggagatgaaatggcggcacgttcctataaacacgtgaccaactcgactatggtaagcgagtacccagcagtttatcatgtcattaaagattctaaagttgcactggaccacaaaatcggtcaaaatcaaggagtgcttgataatgaggacttcttcaaaaaaatgattcgagaagtcgctcgaattgcaatgaaaaccaaccaatctgcaagtgatttgacaagacaggtttttaacgatatcgtcgagtcgctatttgaaggatatgaagaggaataccaacactaatgaatgaaacatataaagttcaagtccaagacttggtagatgatttgaaagcagtctttacccatgcgggcctaggaggggaagcgggtgaatacaaactccttacccagtccttcctctacaaatttttaaatgataagtttttatatcaggcaaagtgcctagatgaagttaatacttatgagcacttattgactttgagtgaagatgactatgactggctcttggaggatatcggtacaagtacggcttggctcaagcctgatcagttaatcgaaacccttcaccgtcagcaaaatgaagcgactttctacgagagttttgaaaataccctcaaccagatcgctattgacaataacgatatcttctcagtgcatacggacggagatacggctattcgtctctttgacgagcgtttgattacagataccatctcagatagcagtaagcgtaacgaagtggcaaaagctatcatcaatctccttgcacgcgtcaagtttgatgagagcattttttcacaaggctttgactttttttctactctctttgagtacatgatcaaggactacaacaaagacggaggtggcaagtatgccgagtactacacgcctcactctgtggctaagattattgcagatattctggtggggaatgaccaaccatcaaacgtgcgaatctatgacccgtcagctggttcgggaaccttactgatgaacctggctagtcgtatcggtgtcgataagactactgtctacagtcaggatatctcgcaaaaatcatccaacctccttcgtctcaatctgatcttgaatggactacagcattccattcataatatcgtacaggggaataccattatcgctaatcgccatcctgagaagatggactatatcgtgtcaaaccctcctttcaagctggacttttcagagtggcgtgaccgagtggaaagtttgccagaagccagtgaacgtttctttgcaggtgtgccaaaggttccagctaagtctaaggataagatggcgatttacgagctctttgttcagcatatcatctattccttgaagccagatggtcaagcagccgttgtcttgccgacaggatttatcactgcccagtcagggattgacaaggccatccgtcaacacttggtggatcatcaaatgctggcaggtgttgtctctatgccgtctaatatctttgcgacgacaggtaccaatgtctccatcctctttatcgataagaaaaacaagggcgatgtcgtccttatcgatgcctcaaacctcggaactaaggtcaaggaaggcaagaaccaaaagaccgttctttctcctgaagaagagcagaagattgtcgagacctttatcaagaaagaagccgtcgaggacttttctgtcactgcctcttatgaggaaatcaaggagaaaaactactctcttagcgcaggccaatactttgacatcaagatcgactatgtagatatcacagcagaagagtttgaagctaagttgaccgcctttcaaaatagactctcagatctattccagcaatcgcatgcattggagcaggagattgaagggcagatgaaggggttgaagtatgagtgagaagctaagtgatgttgtaactataattagtggaggtactccaaaaacaagtgtaaaagaatattgggatggagatattgattggttagcagttgcagactttaatacttcaaatcgctatgttagtactgcttctaagaaaatcacggagttaggattaaataatagcaacacaaagatgttagagaaaggcgatttaattatatcagctaggggaactgttggagctattgcacagttaaccaaacctatggcctttaatcaatcatgttttggattaagaggtaagaaaaataagttagaaacagattatttatattattggcttaaaaattatgtggatattttacttaacaaaagtcaaggcagtgtgtttaatactataaatttatccacatttgatgatatcaaaattgacttacctaatattgaaaatcagagatcaatttctaatttcctaactttacttgataataaaatccaaatcaacaaccaaatcaaccaagagttggaagccatggctaagaccctctatgactactggtttgtgcagtttgatttcccagaccagaatggcaaaccctacaaatcatcaggcggaaagatggtctatcacccagaactcaaacgcgaaatcccagagggatggggagtggagaagttgaagtattttctcacaattaaaaatggtaaagatcataagcacttgcaagatggtaagtttgctgtatatggttcaggtgggattatgagaacagttgcagactatttgtattcaggagaatcaattctctttccaagaaaaggtacattaaataatgtaatgtacgtaaatgaggaattttggactgtagatacgatgttttattcagaagttaataaaaataattctgcactgtatgtattctattcagtaaaagatattgattttaataaattaaatacaggaacgggagtcccgagtatgacttcttcaattttatatgatttaaatataattgttcctgaagaaaatattttagaaaaattcaatacgatagttaaacaaaactatgaaacaatcaaattaaataatattcaaaaccaagaacttaaccaacttcgcgattggctcttgccaatgctgatgaatggacaggttataatctaatgtttaggagataatgatatggaaaagagattaaggttatttcatttttctaaagatcaatacggagaaccgtattatgtaccaggtataatttttgacgattctttcgcagagttcagtaaaattgtagaagatttagattctagaataaataaatgtattgatgataaatatgctaagaatatcagatttaagacaccttcttcacagatggtaacaaatgtatcagagatttttgaaaatgaagagaatttcgatagaaactcagaagacattgcaagtaaatttcaagactcaataggacgtaggtttcaaaatgatttttatttagtagtacttacaactgaaattgaaagtagagaagtcctttttcttgttaagatggaaacaggaactgctatccaggtaactgatgaaaacacattaaccacattagacaagattcttccagataagaaatcaagacttcaaaaggctactgtaatctacaaagataaaacaatccagtttaaagaaaatagagaagagccgaattcagaaagagaaaatatccactcaagagttttggataggactgacgagaatatttctggttatttcttcacaaaatttttggatagtaataacgttatagatgatgaagattcagcagctagaatggctatacaagcgattgaaactgtcgttaaaccatacataaagtctgaagtgagtccagaaattgtaaaagaaaagttaacaagttttttatctcagagaagagatacatcatttgaagggctgattcaagaggttagtgatgtattaaactttaatatagaaaatagagaaacagatatagaaaaattatcacaggaagcatatgatttagcgaaaagaaaaaataatactgttgtagctagtttcgtagcaaagttatatcgtccacctaaagtaacatatgtagctcagggagatgaacaacaaattaaaataagctttcttaaaagtctagagactcatagagatgtttattgggatgatgacgacgacgatttttacgttttaaaaattaacaaagaagtaattactctgattgagaggtgattacattgattaaagaacttattaaatatattgacgctttcaatgatgttgtcggacgtattaatattgattataaagaaaataagtttatctacattttagagttcgaaatttcagagaaagagttagatagttttaaggaaaagatcaatagttataaaataaatgaactggatataacttgtaataattacccgttggagtcctgtaaagaaactaaggaaatcaatagggttgctgtaacaatgaaacaaaaccaatttcctttagaggaccaatcattatattttagaaacagcaatgacttttatacatttgaaaaaaagtttttaaaaaagacaacattcaaaagtctagaaaataggaatacaaagataagaatttggattccagaagaaaatagtgatatatattcgcctgttttttcattttatgaagaaagtttagagatacctgatatattaatttcaaaaacggaatttaatcataatatgctttgcgctcttcctaaaataatttcagatagaaattttgatgaatttaaaatcgagacacttgatggttttctaagtatagtttcggaaagaaaaatatccaaagatgaatatattataagttttgaaaaaaatgctattttagaaatgaatagtattgaaatagataatataggtttatttggtgttctcaatcaattatttgattttattttttatgatgacaaaacttattatgaaaagttgataatttttagaaatgttttttctgaatttatcaagcgacaaaatacaattaataatatggattttcaatatattttaaaaaatgtacaatcgaattataatttatttatcaatgataaattgaaaaagtttatatctgataaacaaaagttaacagaagatttttcaaaactgcaaaaagagattttgattagtataaaaaatatttctaatacaatatctcagcaatttttagttttaattgtaacaatattaactacctttatttttaaaaattttaatacaaggctagcgatgtctttaactgtatattctgggatattttatttaatttgtataattatagtaaacaaagtgagaggatggagttttgattctaaatctataatatcagagtgcaatgatattgataaaaactataatatgttgtacagtatagatgaaagttatattattgctttgaaagaatctgagggctataaaacagaattagaaaggttgaaaaaaattgagaccttatataaatggttgatttatagtcttttattcattttgatagttatattgattctgatttataaacataatgaattgtatgatcaaattaatttgtataaagaaatagttgatttgttactaccttaaaatttaaaaaagagcaacattctcaaaaaaagaagcaaatagattgaaatggttactttatatacgttctattgaggagattgattttactgaggtggaagaatggataagtgaaggcagatttggagactaaaatgaaaaagagtttttcgaactcagagaaagaaattttagatttgatatatattccgattgagcaagttactaatttagttggaagctcggttcagtattgtaacaatattcttgtcagaaagaatgaatcgaattattttgttgtgaatgataatatctcagaaattgaatttccggatgaatgtgaaacaggctatattgagtgccactcaagagatgaatatgaaagacctattggagctaaattttttatcaaacaaggagatggggaatataagagaggtaatacagttaacccttctttttgggacatcttaaacaaaaatgatgattatgaaagtttttttcatagaggacatatcatagcttcggtatttggtggagacaaaaaaattcccaataccagaaatagagggaaattatcccagttcattcagacgaagtggagcaacgagaatgattacgggttaaatccatactgtcaatggcgttttgaagagaaaattaaagaaagagtagtgacagattcagtttgtattgattctcgtctcatttatcgaaataaggcagataagattccaattggaatacacatgcaggcagtaacaaagagcgaatctctattcaatgtctttattcctaatattgatccaaatataaaaataaattataaaaaatgcacatttaaattaaataagtaatcgcatccaagtaaaatataactttgtttccgtatttcctgggaactagtagaaagttaggagaaatatgggaaacaacaaccaacgtgccctttgccaacaactctgggctagaaacaaataccttgtcttgagccattccagcaatatttacaatgagattcgccaatatctcaagcaagaagtggtggaggtgagtcaggttcaagagatgattgaccgagcttgtcaaatcccagaacataggggtcaggtttgtaatgcctttcagcatatttggggctattttaaaaagaaagcgacagatgctgagcgcaaggactacatgatcctgctggatcgctaccgctttggtcaggcttccaaggaagatgtaatcgctaagactcgagacttgcttgattgctatccaaatacctacttgcaacattcgactttactgaaaggagactcccatgagactttggcatgagactttgatttcacaacttccccggcctcaacttttggggcaacatcgagagtgttgcgccctgcgtggcaatggttggggcagaaagcatgcgacggtggattatgtctttacccactcgccctatcgtctctatgcctatcatcgcttgattatggaggagatggctgaccgtggctacaatgtcagtccagagtggttggataaaaactatcgtggtaagacctgccctacttatcaagaattagtagaggaaaagttgactagtcctatatacagcgaacatgacgcaacctactatgaggagtgtctggcaaatctccgagagaaggggatagagctggaataatagtaaggattgccttcaatttataactcttctcgtattttttcgaataataaagatgagacctttggaatttttctaaggtcttctttttatgaatgttaggatttacttttaataacttttaagttataattaaattagaaagaggttgctaggtgcatacgatttacttctataaggacaaaaatggaaatgagccagtcttggattatatgagagaattggcctgtcgtaaaagtaaggatagccgcatcaaactcaataaactaaatgactatatcgagttacttagtcagcaagggaccagagctggggaaccttatatgaaacacttggaagatgagatatgggaactaagacctttgagagatcgaattttatttgtagcgtggcttgatggtagttttgttcttttacatcattttgtcaaaaagactcagaaaactcctagaagagaaattgaaaaagccaagcgtgaactgaaggacttaaaagaaagaggggtaagtgatgaagaatagtgctattgggagtaactggaaggatgtcaggtcagaactctttaccaaggaggaaatacttgaaagtgatatgcgagtggctatcatgagtgagttgattgaagccagacatgagcaaggaatcagccagaaaaagctagaggaactcagtggagtgagccagcctgtcatagctaggatggaaacaggaaagacaagtcctcagttggatacagtcttgaaagttttagccagtttaggaaagacactagcagtcgtcccacttgaacagagaaagagttgataggaagaagttggaaaactttaacaaatttaacagttatagtgcctcaagtgtataatatagaaaaattatgctttatttatatcaagtgcgaacgaagtgagcttttagcggatatttcccgctatagtggtattctagataataatttattattatctagaacggaatttttgagacattctggctcaaaaattagggatgaaattacgaagtgagttgctcccgtccgcacttttcagggaaatatcagaattacaaaagaaaaatcaacctatagtcttttctaataacaagtcatagtcacttataagaattactaataacacgtttgaagagcctaactgcaatagagctataaaacaagatatacaaaggatttgaggcatgtgtctcaagtctttttcttttgtctaaaatagaggtatagtttcaaactatatcaaagcctaattttttacaattatacagatgatttcttttctgttaagatagtttcaacaacaaattttggaggacacatcatgtcaactacaatcatcggtttccctcgtttgggagaattccgcgaattaaaatttacaactgaaaaatactttagaaaagaaatctcagaagaagaactcttggcagcagcaaaagacttgcgtgctaaacactggaacattgtcaaagaaaaaggcatcactgaaattccatcaaatgacttctctcactatgacaacttcctagatgcagctttccttttcaatgtggtacctgcttcagttcaaaacctggacttgtctgaccttgagcgctacttcgctttgggtcgtggttaccaaggagaaaaaggggacgttcgcgcccttccaatgaagaaatggttcaacaccaactaccactacatcgttcctaagtttgaaaaagacactcaagtcaaacttgcaggtcacaagatcttcgatgagttccaagaagcaaaagaacttggattgaacactcgtccagttcttgtaggtccattcactttccttcaattgtcagactttgaagaaggtgtgaaagcagaagacttcgtagacagcttagtggctgcttaccaagaagtttttgcaaaattggctgaacttggtgcaactcgcatccaattggatgaagcggctcttgtaaaagacttgacagctgaagaaaaagctctcttcttgaacctttacaataaacttttggctgacaaaaaaggtcttgaagtcttgcttcaaacttacttcggagatgttcgtgacgtatacgctgaccttgtaaacttgccagtagatgctatcggtcttgatttcgttgaaggtaagaaaactcttgaattggttaaaggtggtttcccagctgataagactctttatgcaggtattgtcaatggtaaaaacatctggcgtaataactacgaaaagagcttggctgttcttgaacaaatcccagctgaaaacattgtcttgacaagctcatgctcacttcttcatgtgccatttacaacagctaatgaagaatttgaaccagctatcttgaaccactttgcctttgcagttgaaaaattagatgagatccgtgatttggatgctatccgcaatggtcaaggtgaagaagcacttgcagccaacaaagaactctttgcgactgagcgtgttggtgaaaatgcggaacttcgtgcgcgtatcgctggcttgacagacgcagactacactcgtttgccagcctttgcagaacgtgaagctatccaagaagaagctttcaaacttccagctcttccaacaacaactatcggttcattccctcaaacaaaagaagttcgtgctaaacgtttggcttaccgtaaaggtgaattgtctcaagaagagtatgacgctttccttgctgaaacaattgacgaatggatcaaatggcaagaagatatcgactttgatgtccttgttcacggtgaatttgagcgtaatgacatggttgagtacttcggtcaaaacttgtcaggttacctcttctctaaaaatggttgggtacaatcatacggtatgcgcggggtgaaaccaccaatcatctggggtgatgtaactcgtcttaaccctatcactgttaaatggtctagctatgcacaaagccgtacaaacaaacctgttaaaggtatgttgactggaccagtaactattctcaactggtcattcccacgtgaagacatctctatcaaggattctactcttcaaatcgctcttgctatcaaggatgaagtgcttgaccttgaagctgctggtgtgaaaatcatccaaatcgatgaggctgctcttcgtgagaaattgccgctccgtcgtagcgactggtacgaagactaccttgactgggcaattcctgccttccgcttggtacactcaacagtagcgccagacacacaaatccacactcacatgtgttactcagaatttacagatatcatcccagctatcgacaacatggatgcagatgttatttcctttgaagctagccgttcaaaccttgaaatcttggacgaactcaaagcgaaaaacttccaaacagaagtgggacctggggtttacgatatccactcacctcgtgtgccaaatgaaggcgaaatcgacaatacaatcgaagccatccttgctaaagtgccgagcaagaaagtttggatcaaccctgactgtggtttgaaaacacgtggtattccagaaacaaaagaaagcttgattcgccttgttgaagcagctaaagctgcgcgtgagaaattgtaagataaggatttctctagaagcgctgtttggtcaatctgcctgtttcacttggattctaggaatccagctaacgaaaaaaatcaactagaaaaggataatgactatgtcacgccaaacaccgtcactctcatttgaagtgttccctccaaacccagccgtgggtaatgataaaattatttctgctcttcaagatatgcaggagttggctccccactttatcagtgtgactgccagcaataataaatttaatatcaaggaaacgacggtccgtttggccgactttatccaaaatgacttggcgattccgactattgctcacttgccagccatctatttgaccaaggacaaggttgctgaaaccattgctgatttggacaaggttggagtgcagaaaattttggctcttcgtggggatattattccagatgtggaaccacaaaaggatttccgctacgcaactgacttgatcgagttcatcaaggaacaagcccctcactttgatattgttggtgcttgttatccagaaggtcatccagattcaccaaatcagatttcagatattcaaaatcttaagaagaaagtggatgcaggctgttcgagccttgtaactcagcttttctttgataatgagcgcttctatgatttccaagacaagtgcatcttggctgggattgatgttcccattcatgcagggattatgccaattctgaatcgaaatcaggctctccgcctcttgaagacttgtgagaatatccatcttccacgcaaatttaaagccatcttagacaagtatgagcatgaccctgagtcgctcagagcagcaggacttgcctatgcagtggaccaaatcgtggacttggtaactcaggatgttgccggtgtgcatctctacactatgaacaatgctgaaacagcaaaatatatccaccaagcaacccatgccttgtttaatcaccagtctctaggataataaaaagcaaaccattcttctcaggtgaggggaatggttcctttttaatggtaaaggccgcactttttaagaaaaatatgataaaatagactctgtacgtacttgatacaaagatgagggtattaaataatagaatgcatttaaactgcaaggtttagcgatatgagcgagtcaaatcgatatcatttgacgagagagttagtaaagcatttagctaattgcctgatagcgattagcgtgaaaggtttagatgctttagtctcaaacctttctgatgatttgtatcttgagtaattgaacccgggctaaatccctagtgaaaaagatagatttcctggtgtacatggtacactgcgtcaatcgaatgctatcttgtgtaattgaacccggccgaaaagctgtgtaaaaaagataaactgtcttgtcttcatcgaagacttcgtcagtttcctatttttactttgcttttgacgtccttggtatcttgatctttgtaggcaaggcgtataatttcatcaatccaaaggggattaaaatgacaaaacaagtgtttcaaacgacttttgcgggtcgtgagttaattgtagagactggtcaggttgctaagcaagcaaatggctctgttgttgtacgttatggtgagtcaactgtcttgactgctgccgttatgtctaagaagatggcaactggggatttcttcccacttcaagtcaactatgaagaaaaaatgtatgcggctgggaagtttcctggtggctttatgaaacgtgaagggcgtccttcaacggatgcgacattgacagcgcgtttgattgaccgtccaatccgtcctatgtttgcggaaggtttccgtaatgaagtacaagtcatcaacacagttctttcttatgatgaaaatgcctcagcaccaatggcagctatgtttggttcatccttggcgctttctatttcagatattccatttgacggaccaattgctggggtacaagtgggatatgtagatggccaaatcatcatcaaccctacgcaagaacaagcagagcaatcgctccttgaattgacagtagctggtaccaaacacgccatcaacatggtagagtctggtgctaaagaattgtcagaagaaatcatgttggaagctctccttaaagggcacgaagcagtcaaagaattgattgccttccaagaagaaatcgttgcagcagttggtaaggaaaaagcagaagtagaattgcttcatgtggacgctgaattgcaagctgaaatcatcgcagcctacaacagcgacctccaaaaagcggttcaagttgaagaaaaattggctcgtgaagctgcaactcaagcagttaaggaccaagttactgttgtgtatgaagaaaaatatgcagaccacgaagaatttgatcgtatcatgcgtgatgtggctgaaatcttggaacaaatggaacacgcagaagtgcgtcgtttgatcacagaagacaaggtacgtcctgacggtcgtaaggttgatgaaatccgtcctttggatgcggttgttgacttccttcctcgtgtgcacggttcaggtctcttcactcgtggacaaactcaggctctttcagtcttgaccttggctccgatgggtgaaactcaaatcattgatggtttggatccagagtacaagaaacgctttatgcaccactataacttcccacaatactctgttggggaaactggtcgttacggtgcgccaggtcgtcgtgaaatcggtcacggtgctcttggtgagcgtgcacttgctcaagtcttgccaagtttggaagaattcccatatgctatccgcttggtagctgaggtcttggaatcaaatggttcttcatctcaagcttctatctgtgcgggaactcttgcccttatggctggtggtgtgccaatcaaggcgccagtagcagggattgccatgggtctcatctcagatggaaacaactatacagtcttgacagatatccaaggtttggaagaccactttggagatatggactttaaggttgcaggtactcgtgacgggattacagcccttcaaatggatatcaagattcaaggaatcactgcagaaatcttgactgaagcacttgctcaagccaagaaagcgcgttttgaaatccttgatgtgattgaagcaaccattccagaagttcgtccagaattggctccaactgctccgaaaattgataccatcaagattgatgtggacaagattaagattgtcatcggtaagggtggagaaaccatcgacaagattatcgccgaaacaggcgttaagattgatatcgacgaagaaggaaatgtgtctatttactctagcgaccaagatgctattaaccgtgccaaagaaatcattgctggtttagttcgtgaagccaaagtggacgaagtttaccgtgctaaggttgttcgtatcgagaaatttggtgcctttgtcaatctctttgataagacagatgcccttgttcatatctctgagatggcttggacgcgtaccaataatgtcgaagacttggtagcaatcggtgatgaagttgatgttaagattatcaagattgatgaaaaaggacgtgtggatgcttctatgaaagcccttcttcctcgtcctccaaaacctgaacgtgatgaaaaaggcgaaaagtctgagagacctcaccgcccacgtcataacaaggaccacaaacctaagaaagaatttacagaaacaccaaaagattcagaataagaaaaggagaaatgtatgggatggtggcgcgaaaccattgatatcgtaaaagaaaatgatccagcggcccgcaccactttggaggttttgctgacttatccaggtgtcaaggccttggcggcccaccgtctctcgcattttctctggaagcatggcttcaaactcctggctcgtatgcacagtcagttttggcgcttttggactcagattgagattcatccaggcgcacagattgattcaggtgtctttatcgaccacggctctggtctggtgattggggaaacagcgatcgttgaaaaaggtgttctcctttatcacggagtgactcttggtgggactggtaaggatgttggcaaacgccatccgaccgttcgaaagggagcactcatatcagcccatgcccaagttatcggaccagtagaaatcggtgaaaatgccaaggtcggtgctgcagcagttgttgtagcagacgtacctagtgatgtgacggttgtcggtattcctgctaagattgtccgtgtacatggtaaaaaggatgagccggtcattcacgaagtcgaagaaaaacgagagtactacgtcaataaactcgagcaggctaaagaagccagtcacagatcgtctgggttgtagaggatacctatatgattcaagcaagaaacaagttaagccaagaggagatatctgaggcgaaaaaactaattaactgttgccaaaactatgacggtacctatcgtgatccctatctatctaacatgcttaattttgacccaaacatgcccgcctttttcctttattatgaaaaaggcgaacttgttggtttattaactgtctatgcagatgatcaagatgtggaagtgacgatactggttcatccagctcatcgccgtcaggggattgcgcgtgcattacttactagttttgagaaagaaacggcttctttccctattcgttcagttacttttcagacagagcgtgtttttctagaccgccatcctgattttgttagcaactgggaattggtagaggatgaagagacagaaacttggttaggtaaggatagaaaaccttatccgttagcaactgtttccaatcttgaagttttgttagcagatagttcgtatcaggatcaaattagtcagttaaaatttcaggcattttcagaggaacatgagtctagagagattgtggatagatatgtcgctgaagctctgaaggatccagaaagtcgcttatatattttgttaaaagacggtcaggttattggaacttgcacggtagatttatcgactaatacgaattacttctacgggttagcaatatctgaacctgaacgtgggaaaggctatggaagctacttagcaaaatcccttgtcaaccaactaattgagcaaaatgacaaggaatttcagattgcagtagaggacagcaatgtaggtgccaagcgcttgtatgaaaaaattggctttgtcaaacagacccaggtggtttatctgaatgagaaaggagcaagggattccgaagtgtagagagattcggactgaaattcaattgaactcttagtgatgaaactaattgttcttggattttagctttcctaactatgatttatgattaaaatctatgacactatgtctcgtgatttgcgagaatttgtcccgattgaggacggcaaggtcaagatgtatgtttgtgggccaaccgtgtataactatatccacgtagggaatgcccgttcgacggtagcttttgatacgattcgacgttactttgagtatcgtgggtacgaagttgcctatatttctaatttcacggatgtggatgataagattatcaaccgtgccaaggaagaaggcatcacgcctcaggaggttgcggacaagtacatcgctgcctttcgtgaggatgtgacagccttgggcgtcaaacctgcgacccgccatccgcgtgtggtggagtttatggctgacatcatccgctttgtggaagatttgattgaaaaaggctttgcctacgagagtcaaggagatgtctatttccgtgtggaaaaatctcacaactatgccaaattggctaataaaaccttggaagatttggagctgggtgcttcaggtcgtaccgatgaagaaacagctcgtaaggaaaatcctgtagactttgccctctggaaatctgccaaatcaggcgagatttcttgggacagtccttggggacctggtcgtccgggctggcacatcgagtgttcagtcatgtcgacagagattttgggcgacaccattgatattcacggtggtggagctgacctagagtttcctcaccataccaatgaaattgcccagtcagaagccaaaacaggcaagacctttgccaactattggatgcacaatggctttgtcaatatcgacaatgtcaagatgtccaaatccttgggcaactttatcacagtgcacgatgccctcaaaaaccttgatggccaagtacttcgtttcttctttgcgacacaacattaccgtaagcctatcaactttacggaaaaggcagtgcgagacgctgagaccaatctcaagtatttgaaaaacacctatgagcaaccatttactggaactgtaaatgctcaagagttgcaagcttttaaagataagtttgtagcagcaatggatgaagattttaacgcggcaaatggaatcacagtagtctttgaaatggccaagtggatcaattctggcaactatgatgcaagtgttaaggaagctcttgcagccatgttagaagtctttgggattgtctttgttgaggaagttttggatgcagagattgaagacttgatccaaaaacgccaagaagcgcgtgccaatcgtgactttgcgacagcggaccatatccgtgaccaattggctgctcaagggattaagctcctagacaccaaagatggagtgaggtggacacgtgattgatgtcaatctcattaacgggattgcgttagcttttgagggggacgcggtgtattctatgtatattcgccgtcacctcatcctcaaaggtatgaccaagcccaataaactccaccaagaagcgaccaagtatgtctcagccaaggctcaggctcgcctgatttcccttatgttagaggagcaagtcctgacggaaaaagaagaagaaatctataaacgtggtcgcaataccaatagtcacaccaaggctaaaaatgctgatgtggtaacttaccgtatgtccacaggttttgaagcagtcatgggctatctccatatgactgaaaatctggaacgtcttgagagcttgatttcgtggtgcatccaaaaagtggagggctaggacatgatagcaaaagaactacaagactggtttcctgaagctcagatttcagaccaaccagtagagaaagagggctatctcactctccctttagcttctcagcagtggattttgctggaggaagctgggctcagcgagcgtgaaaagcagttggttgcccttttgacccagcaggagcaggctcgttcgctcaatccttggtattcttatctgattgagggtaagggacaggcaccacaagcttttaaaaagattcagctggtttactgtcatctttcctattttcagcaggaaaatctagcttcttggctggatatgatgcggaccctttttcctaactgtcagacggtgcttcaggttggggctcaggattatgttttcgtacttcaacaagataaatacacctctgtacgagctattttaagtgatacgattgaagcggttgagtatgactttggacttcgtctgtcaatcatgttgggccaggtttggtctcagacaggccatcaagccctatcagacttgattaaagcagagcgcgatttgtttaagacttggtggcgtcagggtcaccaaggtgttcacaccttttcacaactctatctttggagtatgggggaaagaattgtggacctgagagtcattaaagaatgtctacaccagatgattttggatcaagaccagattcaggaaatcattctctctctttgggaaaatagtgctgttctcactaaaacagcccagcaactctatctgcaccgcaattctctccaatacaagattgataaatgggaagagttgacagggcttcagttgaaagaattgactgacttgaccctgtgttatcaattgattttaccagatattctctaaagttttgtgcaagttgcacagaacttttttatttttttggtcaccttgccatagaaatgtaaagcgttttcatctataataaaactatcaaaagacaaaaggagttcacctcatggtagaattgaatcttaaaaacatttacaaaaaatatccaaacagcgaacactattcagttgaagacttcaacttggacatcaaagacaaagaatttatcgttttcgtaggtccttcaggatgtggtaaatcaacaactcttcgtatgattgctggtcttgaagacatcacagaaggtactgcatctatcgatggcgtggttgtcaacgacgtagctccaaaagaccgtgacatcgccatggtattccaaaactacgctctttacccacacatgactgtttatgacaacatggctttcggtttaaaattgcgtaaatacagcaaggaagacatcgataaacgtgtgcaagaagcagctgcaatcctcggtttgaaagaattcttggatcgtaaaccagctgacctttcaggtggtcaacgtcaacgtgttgccatgggtcgtgccatcgtccgtgatgcaaaagtattcttgatggacgaacctttgtcaaacttggatgcaaaacttcgtgtatctatgcgtgctgaaatcgctaaaatccaccgtcgtatcggagctacaactatctacgtaactcacgaccaaacagaagcgatgacacttgcagaccgtatcgttatcatgtcagcaactaaaaaccctgctggtacaggtactatcggacgtgtagaacaaatcggtacacctcaagaagtttacaaaaacccagttaacaaattcgtagcaggattcatcggaagcccagctatgaacttcatcaacgtgaaattggttggtagcgaaattgtttctgacggtttccgtttgaaagttccagaaggagcattgaaagttcttcgtgacaaaggctacgaaggtaaagaattgatcttcggtatccgtccagaagacgtgaatgcagaacctgctttccttgaaacattcccagaatcagttgtcaaagctactatctctgtatcagaattgcttggttcagaatctcacctttactgccaagttggtaaagatgaatttgttgccaaagttgatgctcgtgactacttgcaaacaggtgcaacagttgaacttggatttgacttgaacaaagcacacttcttcgacgtagaaactgaaaaaacagtctactaagcaaatgaaatgtcaaaacactgctagaaatctggcagtgtttttttgagattgcgtagaaaaaactcctgggaaattccaggagagtatgagtaattatttgaacttgaatccttcgtaaataagctctgtttttggactttctttcttaatctgtttggcaagtgacttcatcatagaaagaggaccacacatatagacgcttgcatgatcgggcactttttcttgatcaaaattaagatagccgtctttcctactgtctactagatggagttcaaaattaggatttttctgagcatagtcacggagcaaatctaggtagactgcattttcctctccatggaagctatagtagaagtgaacctgtttatctaaaataggatgttcacggatgtaagagatgaagggggtgattccaatacctccagcaatccaaacctgattttctcgtccttcttttatgatcatgtgtccgtaagctctgtctacgcttactttgctgccgacttgaagattgtcatagatattcttggtatggtcgcctgaatttttaacagtaaagtaaagagtttgaccatgacctcctgagatagaaaagggatgcggagcgctttcaaagccttcttggaaaatctttagaaaggcaaattgtcctgattgatagttgaaaggtctgctaagatggatttgaatttctctagtatcatgatttaagtgtttgagattggtaattttccctagataggggaagccaatcttttgatatagaaaaatgatataaaaaccagctagtaagcctaaaagggcatagctaccaacaagaaaacttagaagattaaatgtaaggagacgattgcccatcatcatgtagacgtgaaggagtccgaaaatataagctaggtaaactagacggtgaatccatcgccaagcttcgtattggatgtatttgcctaaataggcgacaaggatgatactgacaaagatatagatggcaagatttccaaactgagtagctaatcgagagccccacaaaccgcccatactaaagttatgaaagatgagtaggatgatggagagaaaggctgtgaatttgtggacggtgtagaccttctccaaaccgtgaaaccagttttctattagagggagacgagtggcgaggataaaggtcagagataggcttgttaaagctagtcctggaatcatgaattggggagaagtgttcatccaagtcaaaatagtcaagataaaactagctatgataaagagtagtcctttgattgatttcatagaaaattccattttattaagattttgatttgttgtaaataaatttgttacattttatcatagaaaaagtatggtgtcaaattgaggtctataaatgtttactatcatcaaaaaactctccaattgaactggagagtggctgtttatactcaatgaaaatcaaagagcaaactaggaagctagacgcaggctgtacttgagtacggcaaggtgaagctgacgtggtttgaatttgattttcgaagagtattattctgcagcttgttgccaacgtttggccagcatatgagataggctcgaaattgctaggttaaagctgaagtagatgagggcaatcaggatatacagactgaagacttgctctggttcgaaataacggcccatgagaatttggctagctccaaagagttcttgtagggcgataacagagtagaggaggctggtatccttaatcacggttacaaactgagaaatgatggctggcagcattttacgaatggcttgtgggagaatgatgtggtagaggatttgggctgaggtaaatccttgcgacattcctgcttcgtactgccccttgtctacggcattgagaccgcctcggataatctcagctagggccgctgatgtaaagagggtaaaggcagtgattcctgctggtgtggatttcatcttgaacactaaaaagatagtgaaaatccagaggaggttgggaacgttacgcacaaactcgatgtaaatgctggagatgatgcgcaagataggatttttgccatttctcatgacagctagcaccgtaccgataagggtagagaggacgatggcaatcagagaaatgtagagggtcaagcaaaatcctttaaagataaagactaggttatctggggtcaaaacttctaaaatggattccatagtaacctcctaaagtgaataggcttttttgttggcttgctccatcttgcgaccaaactgggcaacagggaagcagagagaaaagtagagaagggcagcgcctaaaaaggctggaatgtagtttccattgagagctgaccaagacttggtcacaaacatcaagtccactccagagatgatagcgacggtggaggtgtttttgatgaggttgacgatttggttggtcaaaggagggagaatgatacgaaaggcctgaggcaagataatcaaacgcatagcactgatataggtaaaaccttgcgacaaggcggcctccatctgaccgctaggaatagactgaattcctgagcgaatcacctcagcgatataggcgccgtgataaagtccgacgcagagaacagctgtccaataaatcggaatcatgatgatatggtcactgataagaggtaggccataaaaaacgataacaaactgcaccaagaggggagtattttggtaaaattcgacaaagatgcgagccaaaattctcaatatcggacgtttactggttgacatggctccgaagaagatgcccaaaaccatggctaggataaaggatccaatcgctagggcaagggtgaagaggaaaccattgaaaaattgtccaaaatcctgaaaataggctgtccaagatgataaatctgtcatggggtgtcctccttaatctgcggtatgactagatggtttgagcttgtaacggtcatagagtttctgcaaactgccatccttgctccatttagtaaccaagttatcgagatagtcgttgagttcggtatttgatttcttggtaacgataccgtagtcagatggcttgaaactatcatctagtagtactgtgcgtttgctgatgtagccagacaaaatcgagcggtcaacggaaaaggcatcaatacggtgagcgtgtagggaagtgatcaattctgggtaggaaccaagttcgacgaatttaaacttcaggcctttctttttacccagttcagtaatcaggcgttgggtgatggaaccttgggcaacaccgatggtttttccgtttaggtcctcaatgcttttgattttggcagatttattgaccaaaaagccagatgcgtccgtgtagtagggactggtaaagttgtagagttttttgcgttcgtctgtgatggtaaaggttgcgatatccatatcgacctgttcattgtctagaagtggtccacgagtttgtgcggtaacaggcacatagcgaaccttgaccttgagttcatctgctaccatcttggccaagtctgtttcgataccagaataggtccctgtcttaggatccttgtagccgaaattgggaacgtcttgttttacaccgacaaccagctcgcctctcttttgaatgtctgcgacactggtatcagcctgaactggttttgcagcagcaaggcccaaaaggctaatcaataatgcggataaaaagaatttctttttcataggcgcctccttatttgactttgtcactttcgtggttgatgattttgctgaggaattgttgggcacgaggttcacttggattgtcgaaaaagtcatcaacatctgtcgtatccaccaaaacctctccatcagccataaagatgatgcggtccgcaacttcacgggcgaagcccatttcatgggtcacgacaatcatattcataccatcgtgggctaatttttgcataactgccagaacatcgccgatggtttcagggtcaagagcagatgttggctcatcaaagaggaggagttcaggatgcatagcgagtccacgtgcgatggcaatccgttgtttttgtccaccagatagcatggctggataagaatctttcttgtcccacatatttacaaattccagatatttttgggctgttttttcagcttctattttatcaattcctagaacttttatgggagctagtgttatattttctaacaccgttctgtgtggatagaggttgaaatgctggaaaaccataccgacttccttgcgaagcggtactaaatctttctggctggcaccagcaacttggtgaccatttactagaaggcttcctttatcaacagcctccaaaccattgatggtgcggataagagtggattttccagaaccagaagggcctaggaggacaacgacttgccctttttcaaaacggagattgatgtcgcggagtgcgtggtagtctccgtaatatttttcgacgtgttcaaattctactaaagccataaggaatctcctttgtgttagattttataacatgattctacaccaaaagatttgtcttgtcaaatcatatctgaaaaaattcactaaaattttataaaaaagcaatctggatagagaaaaagcctaaatcgtgttataatgaagcaagagaattcttagaaagagtggatgtctttttgataacacctacttatgaatggcagtttgccccgcaggtagaagatgcggattttacaaagatagccaagaaggctggactgggtcctgaggtggctcggttattatttgagagggggattcaggaccaagaaagtctgaagaagtttttagagccttctttagaggacttgcatgacccttatctactccatgatatggacaaggcagtggaacggattcgtcaggccattgaagaaggggaaaatattctcgtctatggagactacgatgcggatggtatgacttcggcttctattgtgaaggaaagtttggaacagcttggtgccgagtgccgggtttatctgcccaatcgttttaccgacggttatggacctaatgccagtgtttacaaatactttatcgagcaagaaggaatttccttgattgtgacggtggataatggggttgcgggtcatgaggccattgacctggcccagtctatgggagtggatgtcattgtgactgaccaccattccatgcctgaaaccttaccagatgcctatgctattgtccatcctgaacatccggatgcgaactatcctttcaaatatttggctggttgtggagttgctttcaagctggcttgtgcccttttagaagaagtacaagtggaattgcttgatttggtcgctattggtaccattgctgatatggtgagtttgacggatgaaaaccgtatcttggttcagtatggtctggagatgttgggacatacccagcgcattggtctgcaagaaatgctggacatggctgggattgctgccaacgaagtaacagaagaaacggttggtttccagattgcccctcgtttgaatgccttgggccgtttggatgatcccaatcctgccattgatttgctgactggctttgatgatgaggaagcacatgagattgctctcatgattcatcagaaaaacgaagagcgcaaggaaatcgtccagtctatctatgaagaagctaagaccatggtggaccctgagaagaaggtccaagtcttggctaaggaaggctggaatcctggggttctgggtatcgtcgctggtcgtttgttggaagaactagggcagacagtcattgttctcaatatagaggacggtcgtgccaagggtagtgctcgtagtgtggaagcggtcgatatttttgaagccctagatccccatcgcgacctctttatcgcatttggcggtcatgctggtgcagcaggaatgacgctggaagttgagaaactctcagatttatctcaggttttggaagattatgtccgtgaaaaaggagcggatgctgctggcaagaacaagttaaatctagatgaagaattggatttggaagcacttagcttggaaacagtcaaaagttttgaacgtttggcaccttttggcatggacaatcagaaacctgtcttttatataaaggattttcaggtcgaaagtgcccgtaccatgggggcaggcaatgcccatctcaaactgaaaatttctaagggtgaggctagttttgaagtggtggcctttggccaaggcagatgggcgacagagttttctcaaaccaagaatctagagctggcagtcaaattgtctgtcaaccaatggaatgggcaaactgccctccagttgatgatggtggatgcgcgtgtggagggtgttcaactttttaacatccgtgggaagaatgcagttttgccagaaggggttccagtcttggattttgctggagaatttccgaatctagtaaatagtgaagctattgtcgtgaaaaccattcctgaggatattactcagctgaagaccatttttcaggaacaaaatttctctgctgtctatttcaaaaatgatattgacaaggcctactatctgacagggtatgggactagagagcagttttgccaaattgtacaagaccatctaccagtttccagagtttgatattcgctacaagctgaaagatttggcagcttatcttaatattcagcaaatcttgctggtcaaaatgattcaaatatttgaagaattaggttttgtggtaatcaaagatggggttatgacagtcaataaagaagcgccaaagcgggaaatcggagaaagtcagatttaccaaaatctcaaacaaaccgtcaaagaccaagaaatgatggcgctgggtaccgtgcaagcaatttatgactttttaatggaaaaagagtagatcataggaaagagttgggaaaccagctcttttttgaaaacaaatcttcattttgaaaatcatcaaaaaaatggtataatggtaggaaaagattcggctaaaagtaatgcttttagaataaaagggcaagcaaccctataatcaagataaactaagctttcggaggaaaaatgagtaatatcagtttaacaacacttggtggtgtacgtgaaaatgggaaaaatatgtatatcgctgaaatcgatgggtctattttcgttttggatgcaggtctaaaataccctgaaaatgaacaactaggggtggacgtagtcattcctaatatggactacctttttgaaaatagcgaccgtattgctggggttttcttgacccacgggcatgcggatgccattggtgctctgccttatctcttagctgaagccaaggtacctgtatttggctctgagttaaccattgagttggccaaactttttgtcaaaggaaatgacacagttaagaaattcaatgatttccatgtcattgatgaggatacggagatagattttggagggactgtggtgtccttcttccgtacgacccactctatcccagaaagtttgggtgttgtcttgaagacagctgaaggtagtatcgtttatacaggtgacttcaaatttgaccagacagctagtgaatcttatgccacagacttcgctcgtttggcagaaatcggtcgtgatggagttctagctcttcttagcgattcagccaatgcggacagtaatatccaagtggctagcgaaagtgaagttggggacgagattactcaaaccatttcggactgggatggtcgtatcattgttgcagcagtagctagcaacctctctcgtatccagcaggtgtttgatgctgcggatgcaacaggccgtcgtgtggtcttgacaggatttgatattgaaaatatcgtccgtactgctattcgcctcaagaaattgtctctagctaacgaaagtcttttgattaaaccaaaagatatgtctcgctttgaagaccatgagttgattattcttgagacaggtcgtatgggtgagcctatcaacggtcttcgcaaaatgtcgattggtcgccaccgttatgtggaaatcaaggacggtgacttggtctatatcgtaaccactccgtctatcgctaaagaagcagttatggcgcgtgtggaaaacatgatttatcaagctggcggggttgttaaactgatcacccaaagtttgcgtgtgtcaggtcacggaaatgcgcgtgacttgcagttgatgatcaacctcttgcaacccaagtatctcttcccaattcaaggggaatatcgtgagttagatgctcatgctaaggctgctatggcagttggaatgttgccagaacgcatttttatccctaaaaagggaaccagcatggcttatgagaatggagactttgtcccagctggagcggtttcggcaggggatgtcttgattgacgggaatgctattggtgatgttggtaatgtggttcttcgtgaccgtaaggtcttgtcagaagatggaattttcatcgtcgcaatcaccgttaaccgtcgtgagaagaaaattgtggccaaggctcgtgttcacacgcgtggatttgtttatctcaagaagagccgtgatattctccgtgaaagttcagaattgattaatcagacggtagaagactatcttcaaggagatgactttgactgggcagatcttaaagggaaggttcgtgataatctgaccaagtatctctttgaccagactaagcgtcgtccagctattttaccagtagtcatggaagcaaaataagcgatgaaataaacggagagaaagtcgaatttcggctttttcttatagaaaaatagaggaaaaattatggcagtaatgaaaatcgagtattactcacaagttttggatatggagtggggagtgaatgtcctctatcctgatgctaatcgagtggaagaaccagattgtaaagacattccagtcttgtacctcttgcacgggatgtctggtaatcataatagttggctcaagcggaccaacgtagaacgcttactccgaggaaccaatctcatcgttgttatgcccaataccagcaacggttggtataccgatacccaatatggttttgactattacacagctctagcagaggaattgccacaggttctgaaacgcttcttccctaatatgactagcaagcgtgaaaaaacctttatcgctggcctctctatgggaggctatggctgtttcaaattggctcttgctacaaatcgtttttctcatgcagctagcttttcaggtgcgcttagttttcaagatttttctcctgaaagccaagatttgggaacaccagcttactggagaggtgtttttggggagattaaagattggacaactagtccttattctctagaaagtctggctaaaaaatcggataaaaagaccaaactttgggcttggtgtggcgagcaggatttcttgtacgaagccaataatctcgcagtgaaaaatctcaataaactgggatttgatgtgacctatagccatagtgctggaactcacgaatggtactactgggaaaaacaattggaacggttcttagcaaccctaccaatcgatttcaaattagaagagagattaagctagtttagtttgtattactctttcaataaccatgtcttctatggaatagaaactaaaatatgtttttactagactttctaaacaaaaatagtagaatagtagttaaattctattattgttggaaagagagtaagagatgtatcgttatcaaattggcattcccacattagaatatgatcagtttgttaaagaacatgaattagtcaatgtattacaaagtagtgcttgggaagaggttaagtctgattggcaacatgaaaagtttggcgcctaccgaggagataaattactggctacagctagtattttgattaaaactcttcctctaggctatagaatgttttatatcccaagaggtcctgtattagattataaggatgctgaactcttgaactttgttcttcaatccattaagtcctatgctcgaagcaagagagcgatttttgtgatttttgacccaagtatttgcctatcgcaaagttcaatcaagcatgaaaaaatagaatatcctgaaaatatggctattattgaaaatttgcaaagaatgggagtaaggtggtcaggaaagaccgatggaatgggagataccattcagcctcgtattcaggcaaaagtatacaaggaaaattttacagaagataaactttgcaagtcaacaaaacaagctattcgatccgctcgaaataagggtgtagagattcagattggtagagatgaattgttagaatctttctcgtttttgatgaaaaaaactgagaagcgaaaagatatccatttgaggaatgaagcctattataaaaaattgttagataattttaaggacaaggcctacattacgctggctactctggatatcgctaagcgtttacgagaattagaagaacagttagcgaaaaacttagcgttggaagaagcgtttactgagtcgactcgaacttcaaaagtagaagcccagaagaaggaaaaagagcgtttggtagaagaaagagatttcttgcagagatatctgaatgaagaaaaatcaaacattcctttagcagctactttgagtttggaatttggtaatacctctgttaatctatatgctggtatggatgatgcttttaaacgttataatgcaccaattttagcttggtatgaaacagctcgctatgcttttgagcgaggtatggtgtggcaaaatttaggtggtgttgaaaactctctcaatggtggactttaccattttaaggaaaaatttaatccaacgattgaagaatacttgggtgagtttacaatgcccacccatcctctttattctctgttaagaatcgctcttgattttcgcaaggcattaagaacaaaacatcatagaaggtaagtacatggcattaattacactcacaaaagaagaatttcaagcttattctgatcaggtctcttctcgttcttttatgcaatctgtccagatgggggacttgttagaaaaaagaggggctcgaattgtttatcttgcattgaaacaagaaggagaaattcaagttgcagctctggtttatagcttgcccatgctgggtggcctacatatggagatcaattcggggccgatttatacccaacaagatgctctcccagttttttatgcggagttaaaagaatatgccaagcaaaatggtgtattagagttgcttgtaaaaccttatgaaacttatcaaacttttgatggtgaaggtaatccaatagatgctgagaaaaaaagtattattcaaggtttgactgatttaggttatcaatttgatggtttaaaaacaggttacccaggtggagaaccggattggttatattgtaaagatttgaatgagctaactgaaaagaccttgcttaacagttttagtaaaaaggggaaagctttggtgaaaaaggctgatacatttggtattcagttgaaaaaattaaatcgtgaagaactttcaatttttaagaatataacaaaagaaacctctgaacgtagagaatatagtgataaaagtttagaatattatgagcacttttatgattcatttggagaacaagcggagtttgtaattgctaatctaaatttaggagaatatatacaaaatttaatacataagcaaaaagaattatctgaaaaaatagctacctcactactcttattagaacaatatccagattctgcacaaaagaaaaaagaacacaaagaattggctaggcagtatgaaagctttgaagttcgaaaagcagaagcacgagagttgattgaaaaatatggagagaaagatcttgtcttagcaggtagtttatttatttatatgcctcaagaaacgacctatctttttagtggttcctatactgagtttaataaattttatgcaccagctttgcttcagaaatatgttatgttggaaagcataaaacgtgggatccctaaatacaacttcctagggattcaagggatttttgatggtagtgatggtgttttgcgttttaaacaaaattttaatggctatattgtacgcaaagcgggtactttccgttaccatccatcacctttaaaatacaaagctattcagttattcaaaaaaatattaggacgttaagatgaaaaagccagtatttagctttctttcagcttgatttagtaaaatagtctttatttgctagaaaggtggagagacatgcgctggattttttgtttgataggggctttcttttcttttgtgtggcgtttgttttggcgcctggtttggatagttgtgctcttatgtgcgtttgctttcggacttctctgctatctgaacggggattttcaaggagcgctaaagcaggcagaacggtcagtcaagattggtcaacaaagtatcgaccgatgggaaaaaacagggcaactgcctaagttgaaccagacagatagccaccagcattctgaaggaaggtggccacaggcctctgctcgtatttacttggatccccagatggattcacgctttcaagaagcttatttagaagcgattcagaattggaatcaaacgggtgcttttaactttgaaattgtcaccgagtccagcaaggcagatatcttggctacggagatgaatgacggaggtactcctgtggcaggagaggcggaaagtcagaccaatctcttaacaggacaattcttgtctgtaacggtgcgtctgaatcattattatctgtccaatcctgactatggctattcctatgagcgcgttgtccatacggcagaacatgagttgggtcatgcgattggcttggaccatacagatgagaagtctgtcatgcaacctgcgggttccttttatggtatccaggaagaggatgttgcaaaccttcgaaaaatatatgagactagtgagtagggaacaatctttccctacttttttgctataatggaattatgaacaacttgattaaatcaaaactagagctcttgccgaccagccctggttgttacattcacaaggataaaaacggtaccattatctatgtaggaaaggctaaaaatctgcgtaaccgcgtgcggtcctattttcgtggaagtcatgataccaagacggaagctctggtgtctgaaattgtagattttgaatttattgttacggagtctaatattgaggcacttctcctagaaattaatctgatcaaggaaaataagcctaaatacaatatcatgctcaaggatgataagtcttatcctttcatcaaaatcactaatgagcgctatcctcgtttaattatcacccgtcaggtcaagaaggacggcggtctctactttggaccttatccagatgtgggggcagccaatgaaatcaagcggctgctggatcgaattttcccttttagaaagtgtaccaatccaccgtataaggtctgtttttactaccatatcggccaatgcatggcccacactatctgtaagaaggatgagtcctacttcaagtctatggctcaggaggtttctgatttcctaaaagggcaggatgacaaaatcattgatgacctcaagggcaaaatggcaacggcagcccagtctatggagtttgaacgtgcggcagaataccgtgacctgattcaggctattggaacgcttcgaaccaagcaacgggtcatggctaaggatctccagaatcgtgatgtctttggctactatgtggacaagggttggatgtgtgtgcaggttttctttgtccgtcagggaaaactcattgaacgtgacgtcaatctattcccctactacaatgatccggatgaggattttctaacctatgtaggacaattctatcaagaaaaatctcatctagttcccaatgaggtgctgattccgcaggatattgacgaagaagctgtcaaggtcttggtggataccaagattctcaaaccccagcgtggagagaaaaagcaactagtcaatttggctataaagaatgctcgagtcagtctagagcagaagttcaatttgttagaaaaatctgtcgaaaagacccaaggagctattgaaaatctaggtcgtttgctccaaattcccaccccagttcgcatcgagtccttcgataactccaacatcatgggaactagtcctgtttcagccatggtggtctttgtcaacggaaaacctagtaagaaggattaccgtaagtataaaatcaagactgtcgtcgggccagacgactatgctagtatgcgagaggtcattcgcaggcgctatggtcgagtacagcgtgacggtttgactcctccagatttgattgtgattgatgggggacaaggtcaagtcaatattgccaagcaagtcattcaagaggagctgggcttggatattcccattgcaggtctgcaaaagaatgataagcaccaaacccatgaattgctctttggagatccgcttgaggtggtggagttatctcgcaattctcaggaatttttcctcctccaacgtatacaagatgaggtccaccgctttgctataactttccatcgccaactgcgctcgaaaaattctttttcatcacaactggatggaattgaagggctgggacctaaacgcaagcagaatctcatgaagcatttcaagtctctaacaaaaatcaaggaagccagtgtggatgagattgtcgatgttggagtacctagagctgttgcagaggctgtgcagaggaagttgaacccgcaggaagcagtggaattagctcaagtggcggaagaaagagtagattaccaaacggaaggaaaccacaatgaaacataaaatcgcaattttatcagatattcatggaaatgcgacggctttagaagcagtgattgcagatgctaaaaatcaaggagtcagtgaatactggcttctgggagatatttttcttcccggtccaggtgcaagtgacttggtagccctgctaaaggaccttcctatcacagccagtgttcgaggcaattgggatgattgtgtccttgaggccttggatggtgaatatggtttggaacatccacaagaaatccagtcaatgcgaatgacccagtttttgatggagcgaatggatcctgcaacgattgtctggttacgaagcttgcctttgctggaaaagaaagaggttgctgggttgcgcttttctatctctcataatttacctgacaaaaattatgggggtgacttgttggttgggaatgatacagaaaaatttgaccaactgctagatgaggaaacggacgtggcagtctatggtcatgtccacaagcagttgcttcgttacggcagtcaagggcaacaaatcatcaatccagggtcgattggcatgccctattttaattgggaggcgttaaaaaatcaccgtgcccagtatgccgtgatagaagttgaagatggggaattggtaaatatcctatttcgtaaagtcgcttatgactatgaagcggagttggagttggccaaattcaaggggcttccttttatcgaaatgtatgaagagctacgacgagaagacaactatcaggggcacaatctgaaactcttagccaatttaatagaaaagcatgggtatgtagaggatgtgaagaatttcttggaggctataaagtcagaatataagatggactagtttctttaagcagctgaaaattaattggaactggatgaggggattcctgatttaaatggttttcttcattcggttgcttatccttgttccagtttgtttctacgaaaaatctctgcaagctctttcaaattatggtagaatggaagcagtagaattagaaaaggaaatcgattatgaaatttcttgaattaaataaaaaacgtcatgcgactaagcatttcactgataagccagttgatcctaaggatgtgcgtacggctatcgaaattgcaaccttggcaccaagtgcccacaacagccagccttggaaatttgtggtggtacgtgagaaaaatgccgaactagcaaaattggcttacggttcaaactatgaacaggtatcatcagcgcctgtaactattgccttgtttacagacacagatttggctaaacgtgctcgtaagattgcccgagttggtggtgctaacaatttctcagaagagcaacttcaatattttatgaagaatttgcctgctgaatttgcccgctacaatgaacaacaagtcagcgactacctagctctcaatgcaggtttggttgctatgaacttggttttggctcttacagaccaaggaatcggatcaaatttgatccttggatttgacaaatcaaaagtcaatgaggttttggaaattgaagaccgtttccgcccagaacttttgattacagtgggttacacagacgaaaaattggaaccaagctaccgcttgccagtagatgaaatcatcgagaaaagataggaagaagaaaaaaatgacagcaattgattttacagcagaagtagaaaaacgcaaagaagccctcttggctgacttgtttagccttttggaaatcaactcagaacgtgatgatagcaaggttgatgctgagcatccatttggacctgggccggtaaaagccttggaaaaattccttgaaatcgcagaccgcgatggctacccaactaaaaatgttgataactacgcaggacattttgagtttggtgatggcgaagaagttctcggaatctttgcccacatggacgtggtgccagctggtagcggttgggacacagacccttacacaccaactatcaaagatggtcgtctctatgcgcgtggggcttcagatgacaagggacctacaacagcttgttactatggtttgaaaatcatcaaagaattgggacttccaacttctaagaaagttcgtttcatcgttggaacagatgaagaatcaggttgggcagacatggactactatttcgagcacgtaggacttgcaaaaccagactttggtttctctccagacgctgaattccctatcatcaatggtgaaaaaggaaatatcacggaatacctccactttgcaggtgaaaatgcgggtgctgcccgtcttcacagctttacaggtggtttgcgtgaaaacatggtaccagaatcagcaacagcagtcgtttcaggtgatttggctgacttgcaagggaaactagatacttttgttgcagaacacaaactcagaggagaaattcaagaagaaaacggtcagtacaaggttaccatcattggtaaatcagcgcatggtgctatgcctgcttcaggtgtcaatggtgcgacttacctagccctcttccttagccagtttgactttgctggtccagccaaagactaccttgacatcgctggtaagattctcttgaatgatcatgagggtgaaagtctcaagattgcccatgtggatgaaaagatgggtgccctttctatgaatgctggcgtcttccgctttgatgaaacaagcgctgataataccattgcccttaatatccgctatccaaaaggaacaagcccagagcaaatcaagtcaatccttgaaaacttgccagttgcttctgttagcctttctgaacacggtcacacgcctcactatgtgccaatggaagatccacttgtccaaaccttgttgaatgtctatgaaaaacaaactggtcttaaaggtcacgagcaagtcatcggtggtggaacctttggtcgtttgctagaacgcggtgttgcctacggtgctatgttcccagactcaattgacaccatgcaccaagctaatgaatttatcgccttggatgatctcttccgagcagcagcaatctatgccgaagctatttacgaattgatcaaataaaacgatagaagtctgagattgtatgcttagacttctttttggagggagagtagatgtctcaaattgaaaaaatcaagcaggctattatggcagatccgcagaatgctacctatacagagcgtggcattgagcctctctttgcagcaccaaagactgctcgcatcaatatcatcggtcaggcaccggggcttaaaacccaagaagcaggactttattggaaagataagagtggtgaccgcctgagagactggctaggtgtggatgaagataccttttacaattcaggatattttgctgttctgcctatggatttctactttccaggacatggcaagtcaggagacttaccaccgagagcagattttgcagaaaaatggcatccacagctcttgcaagaattaccagatatccaattgaccctcttgattggccaatatgcccaagcctactatttacaggagaaagtcagtggcaaagtgacagaacgggtaaaacattaccagaactacttgccaacctattttccattagttcacccctcgcctagaaatcaaatctggatggccaaaaatccttggtttgaggcagaagtggtgccagatttgaaaaaaagaattaaaactattttatagtcaatgaaaatcaaagagcaaactaggaagctagccgcaggctgtacttgagtacggtaaggcgacgctgacgtggtttgaatttgattttcgaagagtattaggagaaaaagaatgaaagaaatttcctttgacgcattttaccagctttaccaaaatgaccaactttctttagtggacgtgagagaagtggatgagtttgaagctcttcatttagaaggtgctcagaatcttcctctgagtcaattagctgatacttatgatcaattggacaaggaccagttacattatgttatttgtaaatctggaatgagatcggcgcgtgcttgccaattcctatcagaacaaggttatgaggttatcaatgtacagggtggcatgttagcctttgaagaactttagacattagaattttctcctacttggcgtggactgggtaggggattttatttttagacaattctcatttttaagaatcttgaaaacattcaatatttacttcgtgaagcttttttcatactcctattcatgatatactaggtcagtattttataaatatgaaggagattttcatggctaaaaaaggtgccctaacaggtttactcctgtttggaatattttttggtgcggggaacttgatttttccgccttctctaggtgcactatctggagaacattttcttcctgccatcgcaggttttgtcttttcaggtgtcggtatcgccgtcttgactcttattattggaacgctaaatcctaaaggatatatctacgagatttcaacaaagatagcgccttggtttgcgactctttacctctcagttctttacttgtcaatcggtccattctttgctatcccacgtacagctacaacagcttacgaagtagggattagcccccttttgtcggatgcaaataaaggtcttggtttgattgtctttacagttctgtattttgcagcagcctatttaatctcgcttaatccatcaaaaatcttagaccgtattggccgtattttaacgccagtctttgcgattttgattgttatcttagttgttttaggagctttcaaatacggtggaacaagtcctcaagctgcttcagctgcttatcaagcttctgcctttgggacaggtttcctagaaggttacaataccttggatgctcttgcctcagttgcctttagtgtaatcgcagttcaaaccttgaaacaacttggcttctcaagtaagaaagaatacatttcgactatttgggttgttggtatcgttgttgcccttgccttcagcgctctttacatcggtttaggtttccttggaaatcatttcccagtaccagctgaagcgatgaagggtggaacacctggtgtttacatcttgtcacaagcgactcaagaaatctttggctcaacagctcaactcttccttgcagctatggttactgtaacctgcttcacaacaacagttggtttgattgtgtctacagctgagttctttaatgagcgcttcccacaaatcagctataaggtttatgctacagcctttaccttgattggatttgctattgctaacttgggtcttgatgcgattatcaagtactcaatccctgtactggttatcttgtacccaatcaccattgccatcgttatgattgtcattgtcaacaaatttgtagctctttcaaaaccaggtatgcagttgacaattgcagtcgttacagctattgccattgcaagcgtattaggaagctcatttaaggttgagtttcttgcaaaccttgtcaacgctcttccttttgccaaggcatcactcccatggttagtacctgccattgtcggaatcttgctctcgttggttctaccaaacaagcaagaaagcgatgtttttgaaatggaataatcattaaaatcacttttgtagccaagtctacaggagtgattttctttttttatccgatgataaatgtgttataataggtagcaaaagaggtgaagaaatgaatcaaacagtagaatatatcaaagaactaacagccattgcgtcgccaacgggcttcactcgggagatttcggactatttagtcaagactctagaaggttttggttaccagccggttcgcacagctaagggcggtgtcaatgtgaccatcaaaggtcaaaatgatgaagagcatcgctatgtgactgctcatgtagatacgctgggtgctattgtccgtgctgtcaaaccagacggccgtctcaaactggatcgtatcggtggctttccttggaacatgattgaaggtgaaaactgtaccgttcatgtggctagcacaggtcaaaaggtatcaggaaccatcctcatccaccaaacttcttgtcatgtctacaaggatgcaggaactgcagaacgcactcaagacaatatggaagtgcgtttggacgccaaagtaaccaatgaaaaagaaactcgtgctcttggcattgaggtcggtgattttatcagttttgacccacgaactgtcgtgacagagacaggttttatcaaatctcgtcatttggatgacaaggtcagcgcagcgattttgctcaatctccttcgcatttataaggaagagaagattgaattgccagtaacaacccattttgctttttcagtctttgaagaagtgggacacggtgccaactctaacattcctgctcaggtagtagagtatctggctgtggatatgggggctatgggagatgaccagcaaacagatgagtatacagtatctatctgtgtcaaggatgcatcaggtccttatcactatgacttccgtcaacacttggtgaccttggcgaaagaacaagatatcccatttaagctggatatctatccattttatggttcggacgcttcagcggctatgtctgcaggtgcagaagtcaaacacgcccttctcggtgctggtatcgagtctagtcattcttatgagcgtactcatattgactcagtagtcgcaacagagcgtatggttgatgcttaccttaagagcaatttggtaaattaatatgtgccttatatgtcagagaattgacctcatcaaagctgggaaaaatccttactttgtaagagagttggaaacaggctaccttgtaatcggagaccaccagtattttgcaggctatagcctctttctagctaaggaacacgttaccgaattgcaccatttgaaaaaggaaacgaaactccgttttctggaagaaatgagtgtggttcaagaggcagttgctaaggcctttgttgctgaaaaaatgaatatcgaactgctaggaaatggtgatgctcatcttcattggcatctgtttcctagacgaacagatgatatgaatggtcacggtctcaaggggcgtgggccagtctggtgggttccctttgaagaaatgacctcagaaacctgccaagcaaaaccggatgagattaaaagattagtcaaatgtttatcgtcagaactaaataaactattagaaataaaggagtagaaatgaaaaaaagataccttatcttgacagccttgctagccttgagtctagcggcttgttcacaggaaaaagcaaaaactgaagatggcgcagctaagacagaacaaacagccaaagctgatggaacagtcggcagtaaatctcaaggagctacccagaaaaaagcagaagtggtaaacaaaggagactactacagcattcaaggaaaatacgatgaaatcatcgtagccaataaacactatccattgtctaaggattacaatccaggggaaaacccaacagctaaggcagagttgctcaaactcatcaaagctatgcaagaggcaggtttcccaatcagtgaccattacagcggttttagaagttatgaaactcagaccaagctctatcaagattatgtcaatcaagatgggaaggcagcggctgaccgatactctgctcgtcctggctatagcgaacaccaaacaggtttagcctttgacgtgattagtaccaatggagaattggtcacagaagaaaaagcagctcaatggctcttggaccacgctgctgattatggctttgttgtccgttatctcaaaggtaaggaaaaagaaacaggctatatggctgaagaatggcaccttcgttatgtcggaaaagaagccaaagaaattgctgagactggtctcagtttggaagaatactacggctttgaaggcggagattacgtcgattaatattcttcgaaaatctcttcaaacaatgtcagcggcgccttaccgtaggtatggttactgacttcgtcagttttatctgcaacctcaaagctgtactttgagcagcctgcaactagcttcctagtttgttctttgattttcattgagtataaaaaataaacttttctcttgcaattatagataaatagtgtataatagatgagtatgtgtaaagcatacttgtgggaggtaaaaatctctaattaccgccaaaaccacaaaggaggatttaaaaatggctaaaaaagtcgaaaaacttgtaaaattgcaaatccctgctggtaaagctacaccagctccaccggttggacctgctcttggtcaagctggtatcaacatcatgggattcacaaaagagttcaacgctcgtacagctgaccaagctggtatgatcattccagttgttatctcagtttacgaagataaatcatttactttcatcactaaaacaccaccagctgctgttcttttgaaaaaagctgcaggtgttgaaaaaggatcaggtacacctaataaaactaaagttgctacagttactcgtgcgcaagtacaagaaattgcagaaactaagatgccagatttgaacgcagcaaacgtagagtctgcaatgcgtatgatcgaaggtactgctcgttctatgggattcactgttgttgactaatcaataacacccccaatataacccgcaagacttcatcatttcgagaagtgacgtgggagatgaaaatcgattgaaccacttacaaggagaatagaaaatggctaaaaaaagcaaacaacttcgtgctgctcttgagaaaatcgacagcacaaaagcatacagcgtagaagaagctgtagcacttgcaaaagaaactaactttgcaaaatttgacgcaactgtagaagttgcttacaacttgaacatcgacgttaaaaaagctgaccaacaaatccgtggagcaatggtattgccaaacggtactggtaaaacttcacgcgttcttgttttcgcacgtggtgcaaaagctgaagaagcaaaagctgctggtgcagactttgttggtgaagatgaccttgttgctaaaatcaacgacggttggttggacttcgacgtagttatcgctacacctgatatgatggctcttgttggacgtcttggacgtgtccttggaccacgtaacttgatgccaaaccctaaaactggtactgtaacaatggatgttgctaaagcagttgaagagtctaaaggtggtaaaatcacttaccgtgctgaccgtgcaggtaacgttcaagcaatcatcggtaaagtatcatttgaagctgaaaaattggttgaaaacttcaaagctttcaacgaaacaatccaaaaagcaaaaccagctacagctaaaggaacttacgtaacaaacttgactatcacaactactcaaggtgttggtatcaaagttgacgtaaactcactttaatcagtagtttataaacaaagacgagtacgaaagtgctcgtttttttggctcattgtcaactgtagtgggttgaagaaaagctaagatcgagaaaggacgaaatttgtcctttcttttttgatattcagagcgataaaaattcgttttttgaagttttcaaagttccgaaatccaaaggcatttcgcttgataagtttaacgagattattggtcgcttccaatttggcgttggaatagggtagttgaagggcgttgataatcttctctttatcctttagaaaggttttaaagacagtctgaaaaagaggatgaacctgtttaagattgtcctcaataagtccgaagaatttgtctggctccttgttctgaaagtgaagaagtaagagttgatagagattatagtggtgtttcaactcttctgaatagctcaaaagcttgtctagaatctctttattcgttaagtgcatacgaaaagtagggcgataaaatcgtttatcactgagtttacggctatcctgctgtatgagcttccagtagcgcttgatagccttgtattcatgggatttttgatgaaactgattcatgatttggacacggacacgactcatagtacggctaatgtgttggacaatatggaaacgatccaacacgattttatcgtttgggagtgaaacagtctgggagactgtttcagcctgagcatagaaattagaaagcgaagctgtttagctaattcatagtagggactaaacatatccatagtaatgattttcacctgacaacgaacggctctatcgtagcgcagaaagtgatttcggatgatagtctgggttctaccttcaagcacggtgataatgttgagattgtcaaaattttgcgcaataaaactcatctttcccttagtgaaggcatactcgtcccaagacataatctcaggaagatgagaaaaatcatgcttaaagtggaagtcattgagctttcgaatgacagttgaagttgaaatggccagctgatgtgcaatatcggtcatagaagtcttttcaatcaacttttgcgcaatcttttggttgataatacgggggatttggtgatttttcttgacgatagaggtctcggctaccatcattttagagcaatgatagcacttgaaacgacgctttctaaggaggattctggtaggcataccagtcgtttcgaggtaaggaatcttagagggtttttgaaagtcatatttcttcatttgacttccgcaatcaggacaagatggagcctcataatccagtttagcgatgatttccttgtgtgtatctctattcacgatatccataatttggacattagggtctttgatatcgagtagttttgtgataaaatgtaattgttccatatgaatctttctaatgagttgtttggtcacttttcattatagatcttatgggactttttttctacaacaaaataggctccataatatctataggggggttacccactacaaatattatagagccgtttttttgtctttagttttatttcattagcccaaaccttcttgaaaaatctcaaaagttggtagaaaggtttgtgtttatcaattactcatttgattttaataagattatttaagtatataaaagggttcaaaggggatattaataaaaatgtgtaaaacttagtaataatatacgtaatatattaaaaaaattatcaaataagttgcttttaaaagatgaatatggtatcattaatttgtatgctaaaaacagtttttttgatataggtcacttcttatattaataactttatttgtaaggagttttactatcgattaaattggaggcaacaaaaaaataaggaggatttcattctaaatgaaaaataaacaacaagattttagaacggaaaagtacattcgttacggtattcgtaagtacagctttggtgcagcatcagtagcaattgcagctggtttgatgttcctaggtaatggcgcggtatcagcgacggaagtacaaggcacagaaactgcagtagcagcatcagctccagctgaaaaagctgatcagaatactgcagaagtgaaacctgagactacaaaagcagaagaagcaaaaacagaagaagcaaaaccagtagctaaagtagaggatgctaaaaaagtaaataaagctgtcctagaagcaagtattgctactttggagtctaaactttcaactgctaaatatgcagatgctacagtagtaagctcagctaaggaagtattggcagcagctaaagcaactcttgcaaaagcagatgctagtcaagctgatgtagatgctcaagcagaaactgtatcagcattgagtactgtagttactgagtcaaatactgctggtttcgataaaaagaaagcagctgaaaaagaagctgctaaagcagaagttgaaaaaaaatctactccagcagaaaaaactctttcagaagctaaatcagcgcttgacaaagcttcatcagaagcagatgtaacaaacagacttgcaaaatctgaactttctaagaaggaagtgaaggaagaaaataaagcagctgttgaagcggcagtagctaaaaaccaagcagttctttctgaaacaaaagctcttttagctgaaaagagcgtaacaaaagaacaagtagatgctcaattggaacgcctcaacgagtctattcttgcagtttacaatgaattgaaaaacgcaggaatcggtcgtgatggtaagttcgcaatcaacttggaagacgctcaaacaacagcacttaaagatgcaacagcagaaacaggtgcgaaatggttggaacaaaatggttataaatctttagctgaagctcctaaatatatcaaaggaaatgcagatgatgataaagccattaaaaacctaaacaaccaaattcaatggttggattttggagatgatacggcttggacaaacagaaaagcaaataaacaacttcaagtaggttcagtttatgaaaaagaattgatgcctggatacattgtaaaaatgactgttaaggaattgaaaccattccatgcaacagaaatttataaaaaccgtgtagctggaactagtcatgaagcatcatataaaccgaatgaagaaaatatctttaaccaggttactaaaaatccattttctacaggtatcagtggtaatcaacaaactggatatacacacgttaaaaacgctggattagatacaggttcagcaaaaacaacgattgcaggtactgatgatagtggtacaggacgtgatggtcaaatcgttggtgtcaagtttgctattgaagctacatacaatggtaagccggttaaacctggtatcgttatgacatcaggggaagatatcggtagtttagagacagaaatctatacaacgaatggtacaccttgggaattagcaggagttgttggttctactaatggtcatactgatatgtataaaccacaccctaactttaacagattaaatgagtggggtggaaatttaaacaaatggactactgaagaattacgaaatgctattgatggcaaaatgtttgctactaaagatgcagcaactgcaggtttaggatcacaagtgttcggaggctacacgaacggagactctgctacgccagtagtgtctacttcaaatgtaactgaagtaggattttatatcatgtcttctggacaacaatcatctatgattggtattaaattctctgactttggagatcttccagaatcatatggagcagctgaacacttcttaagaactcaagctaaagattatcaaacaggtcaaattaaccaaattcagcaaccttacctagggactgtcaaagctgatatcgattcagtatctggtacacgtgttcgtggtgtcgattcagatgatacaaaagagcaaggtgatgaaggtgtagctcagcttattgctccagaagatgtgcatattaacaaagataacggtgaaccagaagttaaaattgtacaagctgaagataatacataccgtgttaaagtgattgcatcagcaaatggtaatgataactatgatggtacagtaggccctgcttatgtgcgtggatttatcgatttcaatgggaatggtaaattcgatgaaggtgaagcttctgaagttgttacagtaaatggtaaccaacaaacagtagaactagttttcaaaaatactcaagttattgatactactaaaaatgcagttaacttccgtacgcgtattgcgacagatagaaaacaaattgaaaaaccagtgggaattgctttctcaggtgaggtagaagataaccaaatccaagtatctattcctccacgtggagataaggaagaaacaactggtaaacaaggtgagactcaatctgtaggtattgaatttgtatcacgtgctcaaggagatgatgcttcagatcttggatcaaacaatggtaaaactacctttaattcatacggtaaactagattattctgaacaaggaaactcaatcagcacagaaacaactaagaaaaaacaagctgaaggtgtaatgattgtagatccagaaggaaacttagttaaatcatacactaaagctggtcaaggtacttatacagtaactgatgataaagtaaccttcactccagaagcaagctttgttggaaaagctgatggtatcgttttgcgtgcggtagatgctaatggtcaatcaactggatggacagcacttacggaacaacatggtgtagaaaacattaatgagggatctcatactactgcaactaaaacaatggatgctgtttatattccaacagtaacaccaaaagaaatcactgcagacccagaagaatcaacagatgtacaaggtaaagctcaaaagaaaactccaactttcacagcaggtgcagatacagagaatccaacaccagtaacaccaagtgcacaatatccagctaaattagttgatccagctactggacaaccaactgatgcaacatctgtaactgtagaaggacaaggaacttacacaattgatccaacaacaggagaagtaacattccaaccgcttccaaactttactggaacagcgactggaatcggtgtatcactaacagctcctgtaggtcaagataaagatagaaatcctgtaacagcttcagctacaactacatatacaccaactgtgacaccagtaacaccgacagctgccccagctacttcaactggagtacaaggtgaaacacaaaaaggaactcctacatttacagaaggaaattctgaagttccaattaaagaaggctctgtcaaactattgaatccagatggaacagaagcaactggaccagttgatgctttagatgaaaaaggtaataaggttggtgaatacactgttaacccagctacaggtgaagtaacattcacaccaactgataaaacttacactggtaaagtaacaccagctaaagttcaagcagaagataaaaacggaactaaagtttctacaacttacacgccaacaatcgtaggggtaacaccaacagcagacccagctaaatctgtcgatattcaaggtgcaactcaagaaaatacagtttcatttgaacctggtaagactacaattgctggagaagaaaaaacggtagagatcgatccatctacttacactcttcttggtgaagatggacaaccagctacagaagtaccagctaaagatccgaatggaaaagtaattggtaaatacactcttaaaactgtagatggaaaagctgttgcagtatttgaaccaacagacaaaacatactctggagaagttcaaccagtaaaaatccaagctaaggataaaaacggaacagctgttgaaacaacttacacaccattaattacaccagtaacaccaaccgcggaaccagctgaaacaacagatatccaaggtaaagaacaaactggtaaaccaacatttactccaggtaatccaaatgttccaatggatgatgatactccagcgaccttcgaagatggatcaaaagaaaaagttgtaccaggcgaaggaacatacacagttgaaccagatggaacagtgaaattcacaccagaaaaaggatttacaggtaaaggaacaggcgtaaccgttaaacgtgtagataagaatggcacaccagtgacagctaaatacactccaacagtaacaccagtaacaccaactgcggaaccagctgaaacaatagacatccaaggtaaagaacaaactggtaaaccaacattcactccaggtaatccaaatgttccaatggatgatgatactccagcaaccttcgaagatggttcaaaagaaaaagttattccaggcgaaggaacatacacagttgaaccagatggaacagtgaaattcacaccagaaaaaggatttacaggtaaaggaacaggcgtaactgttaaacgtgtagataagaatggcacaccagtgacagctaaatacactccaacagtaacaccagtaacaccaacaggaacagacgctgtaacagaagatgttcaaggttcaactcaaacaggtaaaccaacatttgaaggtggaaaagtaacagtaaatggtgaagaaaaaactgttgaaatcgatgaagataaaccagctaaattggtagatccaaaaacaggtgatccagttgattcagtaactatcgaaggcgaaggaacatatacagtgtctcctgacggaacagttacatttacaccagagaagaacttcacaggtaagggaacaggtgtaacagttcaacgcgaagataagaacggcacaccagttaaagctacttacacaccagttgtaaaaccagcaacaccaacaagttcagatgttattactacaaatgttcaaggtgctactcaatcaggaacaccaacatttgaaggtggaaaagtaacagtcaacggtgaagaaaaaactgtagaaatcgatgaaactgttaaaccaacatttgatgatggtacaactgagaagaaagtaccaggtgaaggaacatacacaatcgatgagaacggtacagtaacctttacaccagagaagaacttcactggtcaagcaacaggtgtaacagttaaacgtgtagataagaacggtacaccaatcacagctaagtacactccagtagtcgttccagtaacaccaacttcaaaagatactgaatcagaaggtcctaaaggacaacctcaatcaggaacaccaacatttgaaggtggaaaagttacaatcaacggtaaggaagttccagttgaaatcgatgaaacagttaaaccaacatttgacgatggcacaactgagaagaaagtaccaggtgaaggaacatacactatcgatgaaaacggtaaagtaaccttcacaccagagcctgacttcgtaggaaaagctaaaggtgtaacagttaaacgtgtagataagaacggtacaccagtaacagctacttacactccaacagttcgtcctgatacttcattcgttgataaagatggtaacccactttcaccaacagaagatggaactaaaccaactaaagacatcccaggatacaagattgttaaaactgagattgacgaaaaaggaaatacaaaacacatctacgagaaagtgacaacaacttataaagataaagatggcaatgtaattccaaactatccaacagaagacggcgaacaacctaagaaagatatcccaggctaccgcttcgtagaaactaagaaacttccaaatggagatacagagcacgtctacgaaaaagttaagacatcattcaaggataaagaaggaaacgagattccaggtaatccaagcgaagatggcgaccaacctaagaaagatatcccaggctaccgcttcgtagagactaagaaacttccaaatggcgatgtagaacacgtttatgagaaagttaagacaagtcacaaggataaagacggaaatgaaattccaaactatccaacagaagatggcgaccaacctaagaaagatattccaggttaccgcttcgtagagactaagaaacttccaaatggcgatatcgaacacgtctacgaaaaagttaagacatcattcaaggataaagaaggaaacgagattccaggaaatccaagtgaagatggcgaccaacctaagaaagatatcccaggctaccgcttcgtagagactaagaaacttccaaatggcgatatcgaacacgtctacgaaaaagttaagacatcattcaaggataaagaaggaaatgagattccaggaaatccaagtgaagacggcgaccaacctaagaaagatatcccaggctaccgcttcgtagaaactaagaaacttccaaatggagatacagagcacgtctacgaaaaagttaagacatcattcaaggataaagaaggaaacgagattccaggtaatccaagtgaagatggcgaccaacctaagaaagatatcccaggctaccgcttcgtagagactaagaaacttccaaatggagatacagagcacgtctacgaaaaagttaagacatcattcaaggataaagaaggaaacgagattccaggaaatccaagtgaagatggtgaacaacctaagaaagatatcccaggttaccgcttcgtagagactaagaaacttccaaatggcgatgtagaacacgtttatgagaaagtttcaactccagcaccaacgccaacgccaactccatcaacaccagtttacgaaaaagtattaacaacttatgtagacgaaaatggtgaattgattattccgaatgaagatggttcacatccacgtaaatcattagaaggttatgagttggttcgtacagaaacagatgctaatggaaatgttcgcaatgtttaccgtaagattcaatctcaaaaaccagtacaaccagttgagccagctactccagcaatgcctgaacagccagctaaacctcaagtaccggctactccagcacaaccagtacaaccaacagcaatgaaagaagctgaaggtaaacgtgaattgccaaatactggtacagaagacaatgctagcctagcagcacttggacttctcggagtattgagtggatttggtcttgtcgctcgcaagaagaaagaagactaagccttctaattgacatgatttgtttgcaatgaacagattatccttaaaactgatgaatcgaaagattcatcagttttttggctattatggctacagagtgagtagcgaaatcgggctctttgggagtaaataatgattatactttcatatttcggagaaaatatggtataatagagagtaaaaactttgaaagaaagaaaaagatgaatttaaaagattatattgcaacaattgaaaattatccaaaggaaggcattaccttccgtgatatcagtcctttgatggctgatggaaatgcttatagctacgctgttcgtgaaatcgttcagtatgctactgacaagaaaattgacatggttgtaggacctgaggctcgtggatttatcgtgggttgtccagttgccttcgagttgggaattggttttgcacctgttcgtaagccagggaaattaccacgtgaagttatttctgctgactatgaaaaagagtacggtgttgataccttgactatgcacgcggatgccatcaagccaggtcaacgtgttcttatcgtagatgacctcttggctacaggtggaactgttaaggcaaccattgagatgattgaaaaacttggtggtgttgtggcaggttgtgccttccttgttgaattggatgaattgaacggccgtgaaaaaatcggtgactacgactacaaagttctcatgcattattaatgaaaaacagtccctagggctgttttctctacattaggatataaaaacagactatagctagttagagaaaaactataattgaaaactatatcttcttacagtataataaaaggaacaagtgtttgagatttgacttcaaacacatgcaatgattcctgaaaagtacagttaggagagagttatgccgattcgaattgataaaaaattaccagctgttgagattttacggacagagaatatctttgtcatggatgatcaacgcgctgcccaccaagatatccgtcccttgaagattttgattttaaatcttatgcccaagaaaatggtgacagagactcagttgttgcgccatttggccaatacacccctacaactggatattgatttcctctatatggagagccatcgttctaaaacaactcgatcagaacacatggagaccttctacaaaacttttccagaagttaaggatgagtattttgatgggatgattatcacgggtgctccagttgagcatttaccatttgaggaagtggactattgggaggaattcagtcaggttatcgagtggtccaagacccatgtctattcgacccttcatatctgttggggggctcaggctgggctttatctccgctatggggtagaaaaataccagatggatagtaagttatcaggtatttatcctcaggataccttaaaagaagggcaccttctctttagaggctttgatgatagctatgtatcccctcattcacggcacacggagatttccaaggaagaaattttaaataaaaccaatctagagattttatcggaaggacctcaggttggggtttcgattttggccagtcgtgatttacgagaaatttatagttttgggcatttggaatatgaccgtgataccttggcaaatgaatatttccgagatcgtgacgcaggtttggatcctcatattccagaaaattactttaaggatgatgatgtcaaccagacaccttgtctttgttggtcttcatcagcagccctctttttcagcaactgggtgaactatgccgtctatcaggagacgccttttgactggagaaagatagaagatgatgcatctgcatatgggtatttataagaggaattatgacatatttagacgcttttaaatcagggaacttggttttaccgagtgccctgctcttgcattttaaggaactctttccttccagtgacgattttctggtctggcaatttttctatttgcaaaatacgacaggcttagaagaaatgtccccaagccagattgctgaaaggattggcaaggaaatttcagatgtaaaccaggctatttccaatctgacggagaggggactgcttcagtatcgaacgattgaattgaatggtgaaattgaattactttttgatgccagtctagccttggaacgtttggacgacttgcttggagctgttcaatcaagttcagaccaattggcacctcaaaatcagcttaaggatttggtggaaaccttccaacaggagttgggtcgcttgttgacgccttttgagattgaggatttgaccaagactcttaaggaagatgggaccagtgctgacttgattaaggaagctcttcgtgaagcggttttgaatggcaaaccaaactggaagtacattcaggcgattttgagaaattggcgccatgaaggcatcaaaagtgtggtccaaatagaggccaagcgggcagaaagagaagcaagcaatcctcagttgacacaggtatcggcagattttagaaatgccatggatctttggaaggattaatagttggaagcaggcttgaaatccgagtaagatttgcaagctgtgtctaattgtgataaaataaatagaaaataaattgaaaaaagaggtatgtgaaatgtcacgtaaaccatttatcgctggtaactggaaaatgaacaaaaatccagaagaagctaaagcatttgttgaagcagttgcatcaaaacttccttcatcagatcttgttgaagcaggtatcgcagctccagctcttgatttgacagctgttcttgctgctgctaaaggttcaaaccttaaagttgctgctcaaaactgctactttgaaaatgcaggtgctttcactggtgaaacaagcccacaagttttgaaagaaatcggtactgactacgttgttatcggtcactcagaacgccgtgactacttccatgaaactgacgaagatatcaacaaaaaagcaaaagcaatctttgcaaacggtatgcttccaatcatctgttgtggtgagtcacttgaaacttacgaagctggtaaagctgctgaattcgtaggtgctcaagtatctgctgcattggctggattgactgctgaacaagttgctgcatcagttatcgcttacgagccaatctgggctatcggtactggtaaatcagcttcacaagacgatgcacaaaaaatgtgtaaagttgttcgtgacgttgtagctgctgactttggtcaagaagttgcagacaaagttcgtgttcaatacggtggttctgttaaacctgaaaacgttgcttcatacatggcttgcccagacgttgacggtgcccttgttggtggtgcgtcacttgaagcagaaagcttcttggctttgcttgactttgtaaaataatcagtagcaaaagctaggtggaacagcattcagatgtctgttccattttttataggagaggaaagattgaaaacaaagattggaaaaattggattagcaagtgcctttttgcttggattgatcgttaatcaggtggctgcaaatgaagctgaagtgaaagcatcttcggaagaaagcagtgttcaagcttcttctagtaaggtagaagaaaagaaatcagaaacgactacaagtcaaaaagaagaagagaaaaaggttgagacttcttctagtcagcgtccagagaaaaaggaagaagtaaaagagacgcgagctagtagtcagaaagaagaaagtaagccaaattcaacatcagcacattgggaaggtgacttctatgtaaaagcagatggttcaaaagctaagagtgaatggattttcgatactagctacaatagttggttctatataaaagcagatggtcgttatgcccaaaaagaatggcatggaaactactacctcaaagcaggtggatacatggctaaaaatgaatgggtttacgataacaattataagagctggttctacctcaaggcagatggttcttatgcagaacaagaatggcagaaaatcaatggcaaatggtactattttaagaagtggggctatatggctaaaagtcagtggcaaggaaattatttcttgaatggtcaaggtgccatgatgcaaaacgaatggctttacgataatcattataagagttggttctatcttaaggcagatggttcttatgctaatgaacagtggcaaaagattgatggcaagtggtattatttcaagaagtggggctatatggctcaagatgagtggcatggaaactactatcttactgaaagtggtgtcatggcaacaggtgagttaatcatggacgatactcgttatacttttgctgattcaggggaactgaaagaaaagaaagccttgaatgttggttgggtttatcgaaatggacaccgttatttctttaaccatcgtgaagaacaggtcggaactgaccgtgctaagaaggttattgatgtcagtgatcataatggccgcattagtgattggaaaaaggttatccaggaaaatggagttgatggtgttattgtgcgcttaggatacagcggtgtagaagataaggaattggcacataatattcaagaatttaatcgactaggtattccttatggtgtttatctttatacctatgcagaaaatgaaacagatgctgagaatgatgctaagcagactattgaactcttgaagaaatacaagatgaacttatcttatccaatctactatgatgttgaaaactgggagtatgaaaataaatctaagaaagctccagcagatacagacacttgggttaaaattatcaataagtatatggaaaccatgaagcatgctggttaccaaaacgtgaaagtttatagctatcgtcaacttttgcaaactcgtttgaatcatccaaatattttacaacatgtaaactgggttgcagcttatacggatgcgcttgattggaacaatcctcattattcaggagaaaaaggatggcaatatacttcatctgactctcttaaagggatacgaggacaggttgatgtcagtgtctggtattaagatgtaaaatgagaaaagagcctacaaattgtatactctttttctttattttatagctgttaagagagtttgaaagtgactaggttttattctaaaaaaatcttaaattatcagtctattgcaacttttctcatgtgagtcatttggcttgctattggttttccttagtagtatactaaggtagtaatcattaagaagtggttacaaataataatgaatgaggtaaaataaaatggtagaattgaaaaaagaagcagtaaaagacgtaacatcattaacaaaagcagcgccagtagcattggcaaaaacaaaggaagtattgaaccaagctgttgctgatttgtatgtagctcacgttgctttgcaccaagtgcactggtacatgcgtggtcgtggtttccttgtatggcatccaaaaatggatgagtatatggaagctcttgatggtcaattggatgaaatcagtgagcgtttgatcacacttggtggtagcccattctctacattgacagaattccttcaaaacagtgaaatcgaagaagaagctggtgaataccgtaatgttgaagaaagcttggaacgtgtccttgctatctaccgttacttgtcagaactcttccaaaaaggtttggatgttactgatgaagaaggtgacgatgtgacaaacggtatctttacagatgctaaaactgaaactgataaaacaatctggatgcttgccgcagaacttggacaagcacctggtttgtaagaaatagaataatcatataaaaatctgtaggatgcctcttacagatttttttctattctgtaagctattccaaaccagtctttttttgagttttttgataaaatagtactatcagtgaaaaggatggaagcatgactaagaaaatcgtagctatttgggcccaggatgaagagggtgtgattggtaagggaaatcgcctgccttggcatttgccagcagaactgcaacacttcaaagaaacaactctgaatcatgctatcttgatggggcgtgtgacctttgatgggatggggcgtcgcttgcttccacaacgggaaactctgattttgacgcgtaattctgaagaaaagatagacggggttactacttttcaggatgtccagtctgtcttggactggtatcaggctcaagaaaagaatctttatattatcggtgggaagcaaatttttcaggcttttgaaccctaccttgacgaagtaattgtgactcaaattcatgctcgggtggagggagatacctatttccctgaggagtttgatttgtctctttttgagacagtttcaagcaaatcctataccaaagatgagaaaaatccttatgattttaccatccaataccgcaagagaaaggaagtctaatggaacgtagtatatttggttttttcacagccatgctgtgtttggtctgcttacttgcaggagcacaggcttttcgtaaaaagcgttatgggctttctgtcctgctctggttaaatgcctttaccaatttggtcaatagtatccatgctttttacatgaccttattttagatagaatgacagtatagaatagaacggaaggaaatcatgcctacaaataggaataatgatatgatggtttattgctcattttgtggcaaaagccaagaagaagtacaaaaaataatcgcaggtaacaacgcctttatctgtaatgaatgtgtggagttagcccaggaaatcattcgagaggagttggcggaagaagtcttggcagacttgtctgaagttccaaaaccaatcgaactcctccatatcttgaaccactatgtaattggtcaagatcgtgccaaacgtgccttggcagtggcagtttacaaccactacaaacgcatcaatttccacgatacgcgtgaagagtcagaagatgtggatttgcagaagtcaaatatcttgatgattggcccaactggttcagggaaaacttttcttgcccagaccttggctaagagcttgaatgtgccttttgcgattgcggatgcaacagctcttactgaggctggttatgtgggtgaggacgtggaaaatatcctcctcaaactattgcaggctgctgactttaacattgaacgtgcagagcgtggcattatctatgtggatgaaattgacaagattgctaagaagagcgagaacgtatcgatcacacgtgacgtttctggtgaaggggtgcaacaagcccttcttaagattatcgagggaacagttgccagcgtaccgcctcaaggtggacgtaaacatccacaacaagagatgattcaagtggatactaaaaatatcctcttcatcgtgggtggtgcctttgatggtattgaagaaatcgtcaaacaacgtctgggtgaaaaggttatcggatttggtcaaaacaataaagcgattgatgaaaacagctcttacatgcaagaaatcatcgcagaagatattcaaaaatttggtattatccctgagttgattggacgtttgcctgtctttgctgctcttgagcaattgacggttgatgacttggttcgtatcttgaaagagccaagaaatgccttggttaaacaatatcaaaccttgctttcttatgatgatgtcgagttggaatttgacgacgaagcccttcaagagattgccaacaaggccatcgaacgtaaaacgggtgcgcgtggtcttcgctctattatcgaggaaaccatgctagatgtcatgtttgaagtaccgagtcaggaaaatgtgaaattggtccgcatcactaaagaagctgtcgatggaacggataaaccaatcctagaaacagcctagaggtgactatggaacttaatacacacaatgctgaaatcttgctcagtgcggctaataagtcccactatccgcaggatgaattgccagagatcgctcttgcagggcgttcaaatgttggcaagtctagctttatcaataccatgctgaaccgtaagaatctggctcgtacgtcagggaaacctggtaaaacccagctcctgaacttctttaacattgatgacaagatgcgctttgtggatgtgcctggttatggctatgcccgtgtttctaaaaaggaacgtgaaaagtgggggcgcatgattgaggagtacctaacgactcgggaaaatctccgtgcagtggtcagtctagttgaccttcgtcatgacccgtcagcagatgatgtgcagatgtacgaatttcttaagtattatgagattccagtcatcattgtggcgaccaaggcggacaagattcctcgtggtaaatggaacaagcacgaatcagcaatcaaaaagaaattaaactttgacccaagtgacgactttatcctcttttcatctgtcagcaaggcagggatggatgaggcttgggatgcaatcttagaaaaattgtgaggaaaagaaaatggcaaaaacaattcatacagataaagctccaaaggctatcggaccctatgttcaaggaaaaatcgttggcaaccttttgtttgctagtggtcaagttcctctctctcctgaaactggggaaatcgttggagaaacgatccaagaacagacagaacaagtcttgaaaaatattggtgctattttggcagaagcaggaactgactttgaccatgttgtcaaaacaacttgcttcttgagcgatatgaacgactttgttccttttaacgaggtttaccaaacggcctttaaagaggaatttccagctcgttcagcagtagaggtagctcgtcttcctcgtgatgtaaaagtcgaaatcgaagtcatcgcagagattggataagctagttgaagtttggtgttgccaaacttcttttgatataaggagagatagatgacaaagaaacaacttcacttggtgattgtgacaggaatgagtggtgcagggaaaacagttgccattcagtccttcgaagatttgggttattttactattgataatatgcctccagctctcttgcctaagtttttgcagttggtggaaacaaaggaagacgaccataagttggccttggtagtagatatgcgtagccgttctttcttctcagagattcaagctgttttggatgagctggaaaacaaggaagaactggactttaaaattctctttttggatgcagctgataaggaattggtcgctcgttacaaggaaaccagacggagtcacccactagctgcagatggacgaattttggatggaattaagctggaacgtgaactcttggcacctttgaaaaatatgagtcaaaatgtggtggatacgacagaactaactcctcgtgagctgcgcaaaacccttgcagagcagttttcagatcaggaacaagcccagtctttccgtatcgaagtcatgtcttttggttttaaatatggaatcccgattgatgcggacctagtctttgatgtccgtttcttgccaaatccctattatctaccagaactgcgtaatcaaacgggagtggatgaaccagtttatgactatgtcatgaaccatcctgagtcagaagatttctatcaacatttgttggccttgattgagccgattttgccaagctaccaaaaggaagggaagtctgttttgaccattgccatgggttgtacagggggacaacaccgtagtgtggcctttgccaaacgcttggcacaggacttatccaagaattggcctgtcaatgaagggcatcgtgacaaagaccgaagaaaggaaacggtaaaccgttcatgagaaaaccaaagataacggtgattggtggaggaactgggattcctgtcattctaaaaagtctgcgtgaaaaagatgtggaaatcgctgctatcgtaacggtggcggatgatggtggttcatcaggtgaactccgaaaaaatatgcaacaattgacaccgccaggtgatcttcgtaatgtccttgtggccatgtcggatatgcctaagttctatgagaaagtctttcagtatcgcttttctgaggatgcgggagcctttgctggccatccattgggtaatctcatcattgctggcctgtcagaaatgcagggttcgacctataatgccatgcagttattgagcaaatttttccatacaactgggaagatttatccttccagtgaccatcctttgaccctgcacgcagtctttcaggatgggacagaagtggctggagagagccatattgcagaccatccaggcatgattgaccatgtctatgtgaccaatacccttaacgatgatacgcctctggctagccgtcgagtggtgcagaccattcttgaaagtgacatgattgtcctcggacctggttctctctttacctctattttgcccaatattgtaattaaggaaatcgggcaggcgcttttggaaaccaaggcagaaatcgcctatgtctgcaatatcatgacccaacgtggggagacggaacactttacagatagtgaccacgtggaggtcttgcatcgtcaccttggtcgaccttttatcgatactgtcttggtgaatattgaaaaagtgcctcaggaatacatgaattccaaccgttttgatgaatacttggtgcaggtggaacatgattttactggtctttgtaagcaagttccgcgcgtgatttcatccaacttccttcgtctggaaaatggaggcgccttccacgatggggatttgattgtggatgaattgatgcggattatacaggtgagaaaatgagtttcacagtagcagtaaaagaagaaatcctaggtcagcaccatctgagccggcatgaattatctgccattatcaagatgtctggcagtatcggtctctcgacttcgggcctgaccttgtctgtcgtgacagaaaatgccaaactggctcgccacctctatgagtcctttctccatttctatgaaatcaaatcggaaatccgacaccaccaaagaagtaatcttcgtaagaatcgggtctataccgtttttacagatgaaaaggtgcaggaccttctgagtgatttgcacttggccgactctttctttggcctagaaacaggtattgatgaggcgattttatcggatgaggaagcaggtcgtgcctatctttgtggtgccttcttggcaaatggaagcattcgtgaccctgagtcaggcaagtatcagttggaaatcagttctgtttatctggaccacgcgcaagggattgcctcccttctccagcaatttttactagatgctaaggtgcttgagcgcaagaagggagctgtgacctatctccagcgagccgaagatattatggacttcttgattgtcatcggagccatgcaggcgcgtgatgattttgagagggttaagattttgcgagaaacccgtaatgacctcaatcgagccaataatgccgagacagctaatatcgctcggacagtctctgccagcatgaagactatcaacaatatcagcaaaatcaaagatatcatgggcttagaaaatctgccagtggatttgcaggaagtagcgcagttgcggattcagcacccagactactctatccagcagttagcagatagcctcagcacccctctgaccaaaagtggtgtcaaccacagactcagaaaaatcaataagatagccgatgagttataaagatataaaacacctctttcttgacaattaaatagagtatgtgagataataaaggggaattgagaagttctagcattttagtgctaacagaaatcccctcggtactgcaatactgaggggatttttttctaggttagatagcactaaccaggaaggttacttgtcgaagtgatcgtctaaccaacgagtcaccagccatgagatgatactctcgatgactgcgataagtactattttgagaagttctagcatctgtaatacctccttttccaaggcgtattgttagtgccgtccctattatatcacatgttttatcagtttgataggcatttttatttttgttaaagaagggggaaatatgagctaacaaattagccgatgaactataaaaccacgaatcctatgtgactcgtggttctttttctataaactagtagagtgttttggttgtactttttgttctgggtcgatgtagttaatggcattgttaacagcggttggtgcttctccaagccctgtcgcaatcagatcaatttttccgtcatagtagcaacagtcaccgatagcatagatacctgcttggctagattcttgcttgctattgacgataatcttgtgacggttgaggtccagaccccagtttttaaggttaccaacagaagatttgaaaccatagttgacaaagaggtggtctaggtcaatagtttctgtttcatcagatttgacttttgtgatttcaagtttatcgagtgtttttccatctccaaggagttggctagggacgaatggtgtcttgatgatcacagaagattcctgcaaagcttggacactgtgttccaaggcgcggaaattatctctacggtggacaagggtagttggcgcaattttttcaaaagctaaagcccaatcaacagctgagtccccaccacccagaatcgtcactttcttaccagcatattgctgaatgttagaaacgtggtagtggatattttcatagccctcaacgccttctagttccagcggacgtggtttgaaggcaccaccccccatagcaatgataacagttttagacagatgacttcctttagaagttgtgatgacaaatccttcttcttgtttttcaatctcaagaaccgtttcgttgagatgaataggggtatcaaagccatttaattgctcgattagacggttagtcaactcttctccagtcaggtttgggaaacccgggacgtctaaaatttccttttcagggtagagaatagcaggttgtccacctagttggggaagagagtcgatgatttggaccttggcttggcgtaggtgggcatagaaggctgcaaaaagcccgacaggaccaccacctacaatggtaatatcatagagttgagacatggtttctcctttgttttttctagtcagtttattttatcatatttttccttaatttaaaatgaagtaggatagggaaaaaaatgccagaaaaatggtataatagaaaggaacgtgtttggacagagaggagacagcagatgaactttcaacaattatccaatctgcaatattggactagcttgttttctagtccttggagtattgccatcaatctgtttgatattttgattgtggcctatattttatatcgttttacaaaagcgatagctggcaccaagattatgattttggtgcgtggggtcgtgatctttgtattagcccaggttgtggccaatatccttgatttaacaacgatttcttggttgattaatcagattatcacctatggggttattgctgcggttgttatcttctctccagagattcggactggtttggaacgcttgggaagggcgacagatttcttttctactgctcaaattagtgcagaggagcaaatgattcgtgcctttgtcaagtcggttgaatatatgagtcctcgtaagattggtgctctggttgccatccaacgagttcggaccttacaagaatacattgcgacagggattcctttggatgccaatatttcagctgaactccttattaatatctttatccccaacactcccctacacgatggtgctgtgattatcagagaaaatcgaatagcagtaacctctgcctatcttcccttgacagaaagcacagggatttccaaggaatttgggaccagacaccgggcggctatcggtttgtcagaagtatccgatgccttgaccttcatcgtctcagaggaaacaggaggcatttctattacctataacggtgttttcaagcacgacttgacgattgaagaatttgaagcagagctacgagcaattcttttgccagctgttgaggaaaaagtcagtttcaaggaccgtttgctaggaggttggaaatatgagaaaaaatagtctatatatcatttcatctctcttttttgcttgtgtcttattcatttatgcaacgtcaaccaactttcaaaatagcaataccgcaaggcaggtcaaatcagaaacctacaccaatacgataacgaacgttcctatcgatattcactatgataatgaccagtatttcattagtggatttgcatcagaagtttcagtgatattaaccggagctaatcgtgtgaccttggccagcgaaatgcaggagagcactcgtaagtttaaggtcacagcggatttgacggatgccagtgttggaacgattgaagttcccttgaatattgaaaatcttccaagcggattgaccgctgtggcaacgcctcaaaagattacagtgaaagttgggaagaaggttaagcgagatgggatgattgttgtgccacaagttgaccaaagccagattgattccaagctacaaattgatagtgtaaccgtgtcaaacgaacgagtttctgtcacaactgaccaagaaacattagctaaaatcgatcgtattattgcgcttttaccaaccagcgaacgcataaccggtaattacagtggttcagtacctttgcaggcaatcgatcgcaatggtgttgtcttaccggcagttattactccgttcgacacaacaatgaaggtgactacaaaaccagtagcaccaagttcaagcacatcaaattcaactacaagtagttcgtcggagacgtcttcgtcaacgaaagcaactagttcaaaaacgaattaaaaatagaaaaaggattttataaaaatgggtaaatattttgggactgatggagtccgtggagaagctaatgtagaattaacgccagaattggcctttaaactaggacgttttggaggctatgttcttagccaacatgaaacggaagcgccgaaagtttttgtaggacgtgacacacgtatttctggggaaatgctagaatctgccttggtggcaggtctcctctctgtagggattcacgtctacaaacttggtgtccttgcaacaccagcagtagcttacttggtaaaaactgagggagccagtgcaggtgtcatgatttctgctagccacaacccagcccttgataatgggattaagttctttggtggtgatggtttcaaactagatgatgaaaaagaagcagaaattgaagccttgctagatgctgcggaagacactcttcctcgtccaagtgctgaaggcttgggaaccttggtagattatccagaaggtttgcgtaagtatgaaggatatcttgtttcaactggaactcctcttgaaggaatgaaggttgccttggatacggctaatggtgcagcttctacaagtgcccgtcaaatctttgcagatcttggtgctcaattaactgttattggggaaacaccagatggtcttaacatcaaccttaatgttggttcaacccacccagaaacccttcaagaagtggtcaaagaaagtgactcagctatcggtttggcttttgacggagacagtgaccgtttgattgctgtcgatgagaatggtgagatcgttgatggtgataaaatcatgtacatcatcggaaaatacctttctgaaaaaggacaattggcgcaaaatacaatcgtgacaaccgttatgtctaaccttggtttccacaaggccttggatcgtgaaggcattaacaaggcagtcactgcagttggcgatcgttacgttgttgaagaaatgcgaaaatcaggctacaaccttggtggtgaacagtctggtcacgtcatcttgatggactacaatacaacaggtgatggccaattatctgctgttcaattgacaaaaatcatgaaggaaactggtaagagcctgtcagagttggcagcaaaagtaaccatctatccacaaaaattagtcaatatccgagtggaaaatgctatgaaggaaaaggctatggaagtgccagctatcaaggacattatcgagaagatggaagaagaaatggcagggaatgggcgtatccttgttcgtccaagtggaacagagcccctcttgcgtgttatggcagaagctcctacaacagaagaagtggactactatgttgatactatcgcagacgtagttcgagctgaaatcgggattgactaaatcctagaaaactagatgaaaataaaaaattatggtacaatagcttataatattgtagccgagggagaaagacatgaatcttaaacgtgaacaagaatttgttagtcagtatcattttgatgcgcgtaattttgaatgggaaaatgaaaatggagctcctgaaactaaggtggatgtgaacttccaattaattcaacatgaccaagaaaatcaagtgacttccttgattgttgtcttgagttttatgattgtatttgataaatttgtcatcagtggaaccatttcacaggtgaaccatatcgatggtcgtattgttaacgaaccaagtgaattgaaccaagaagaagtggaaaccttggctcgtccatgtttgaatatgctcaaccgtttaacttacgaagtaactgaaattgcattagacttaccaggaatcaatttggagttctaatatgaaattagctgttatcacagattcctctgcctatctcagtgcagataccttgcaaagagaagatttatttgttttggatattcctgtcaatattgatggtgaggagtatgtcgaaggcatcaatctgactgctgaggaattttaccaaaaaatggctcaggcctctgaattgcctaagaccagtcaaccaagtattgccaagttagatgagattctaacttcgctcaaagaacaaggttacacccatgctttagggcttttcctatcttctggaatttcaggtttttaccaaaatatccagtatatggtggatgactatgagggcttaaccattgcttttccagacactttaatcacaagtgctcctctgggtatcatggttgaaagtgtctttaactggcgagaccagggcgatgactttgccattattcaggataagctagctattcagattagtcacacatctgctttcatcatggtggatgacttggaccacttggttaaagggggacgcctttcaaatggagctgcgattttgggcaatctgctaagcattaagccgattctttattttaatgaccaaggtgtgattgaagtgtacgaaaaagttcgtactgaaaagaaagcaaccaagcgtttaattgagattatcaaggaagcaacagcttcaggccaataccgtatcattgtcattcacgggaatgctcctgaaaaggctgaagaattgcgtcagcacttgctagattctgaagtgggtacggatatttcacttgctacatttggtagtgtcattggaacacacctaggagcaggaagtattgctctgggttatattccagtgatttagttagcacttctagactagttaagaaggcttgtatcttagaaattgaacacggactacctgcctcttgaaaaaagatgtctgtcttgccttttgtggaaagtcagcgccatcccctatttttcacgggcagctaaggccctttgtatcttgataattgaacacgcctggaaccctctgtgaaaaagataggtcttccaaggagtatttactccttgatcagaactcctattttcacgttgtgctcttacaggctttgtatcttagaaattgaacacggactacctgcctcttgaaaaaagatgcctgtcttgcctttcatggaaagtcagcgtcattccctatttttcaagggcagctatcgtcctttgtatcttagtcaggagtagagatgagtattcgagtaattattgctggttttaagggaaagatgggccaggctgcttgtcagatggtcttggctgatccagacttggacttggtagcagttttggatccctttgagtctgaatcagaatggcagggtattcctgttttcaaggataaggctgatttggtcggttttgaagcagatgtctgggtagactttactacaccagctgttgcctatgaaaatacacgctttgctcttgaaaatggctttgctccagtagttgggacaacaggtttcacgagtgaagagattgcagagctaaaagcattttctcgtgctcaagatttgggtggcttgatcgctcctaactttgccttgggtgctgttttactcatgcaatttgcaaggcaggctgctaaatatttcccaaatgtggagattatcgagctccatcatgacaagaaaaaggatgctccgagtggaactgctattaaaacagctgagttaatggcagaagttcgagagtctatccagcagggtgcagcagatgaggaagaattgattgcaggtgctcgtggtgctgactttgatggcatgcgcatccactcagttcgtttgccaggtttggtagcccatcaggaagtcatctttggcaatcagggagaaggattgacactccgtcatgactcctatgatcgcagctccttcatgacaggggtgaatttgggaattaaagaagttgtcaagcgtcatgagcttgtctatggattagaacacttattatgagattaacgcaaatgccttctgaatttcagaaggctttaccagtattagaaaaaattaaagaagcaggttttgaggcctattttgttggaggttctgttcgagatgccctcctcaatcgtcctatccatgatgtggatattgcgacgtcttcttatccagaagaaaccaagcagatttttccgcgaacagccgatatcggaatcgagcatggaactgtcttggtcttagatggggacgaggagtatgaggtgactacttttcggacagaggatgtctatgtggactatcgcagacccagtgcggtctcttttgtgcgctcgctagaagaagacctcaaacgccgtgatttcacagtcaacgcctttgccttggacgatacaggagaaatcattgacttgtttcatggtttagaagatttggaaaagcaagtcttacgagcagttggagtggcaagtgagcgtttcaacgaagatgctttgcggattatgcgtggtttccgttttcaagccagtcttggttttgaacttgagacagaaacgtttaaagcaatgaagaccttgacgccacttttggagaaaatttctgtggagcgtaccttcgttgagtttgataaactcttgctggctccattttggagaaggggtttggcttccatgattgagagtcaagcttatgactatctccctgatatggcatctagcaaagacaaacttaacagactgtttgatttggagactgatttcacctttgaatcttcagagcaagcctgggctgctctactgtgggctttggagattgaaaatgcgcagccatttttgaaggcttggaagacctcacgtcagtttgctaagcaagttcaggatttactgactattttggccttgcgtgaaaagggagaattgagcaagcgcgattgttatcgctttgacttggattttcttttacaggctgaaaatcttcgtcaggctcagggaaaaccagtcaacccacaagtcatcacagaaacctaccagagtctgaccattcatgacaagaaagaaatccaaatcaacggtggtattttgatcaaggaatatggctatcaaccaggtccagatttgggagagattttaacagagatagagtttgccattgtcgatggagaattggaaaatgaccgtcaagccatccatgcttatctaagggagaaaaaatgagtgattttatcgttgaaaaactaagcaaatccgttggtgacaagaccgtttttaaggatatttcctttatcatccatgacctagacagaattggtctaatcggtgtcaatgggactggcaagaccacccttttagatgttctttctggtgtttctggctttgatggggatgttagtcctttttcagctaagaatgattaccaaattggttacttgactcaagatcctgattttgataatagaaagacagttttggatacggttctatctagtgaactaaaggaaatccagctcattcgtgaatatgagttgattatgctcaactacagtgaggacaagcaggctcgtttggaacgggtcatggctgagatggattctcttcaagcttgggaaattgagagtcaggttaagacggttctctgcaagctggggattcaggacttatctactcctgttggggaattgtcaggtggtctgagaagacgggttcagttggcacaagtcttacttggtaatcacgaccttttgcttttggatgagccgaccaaccatctggacattgcgactattgagtggctgaccctctttttaaaaaattccaagaagaccgtcctttttatcacccacgatcgttatttcctagacgctttgtcaacacgtattttcgagttggatcgcgcaggtttgaccgagtaccagggaaattaccaggactatgttcgcctaaaggcggaacaggatgagcgcgacgcggctctacttcataaaaaggaacaactttataagcaagaattggcctggatgcgcagacaaccgcaggcgcgtgcgaccaagcagcaggctcgtatcaatcgtttccatgacttgaagaaagaagtttcaggtggtgctgctgagacagacttaaccataaactttgaaaccagtcggatcggtaaaaaagtcatcgagtttcaggatgtttcctttgcctatgaaaacaagcctattttgcaagattttaatctcttggtgcaggccaaagatcgtattggaatcgttggggacaacggtgttggaaaatcaaccctgcttaatctgattgcaggcagtcttgagccgacagcaggacaagttgtgattggggaaacagttcgcatcgcctatttctctcagcaaattgagggattggatgagagcaagcgagttatcaattacttgcaggaagtggcagaagaggtcaagaccagcggtggttctacgacttccattgcggaattgctggagcagttcctcttcccacgttcgacgcatggaaccttgattgagaaattgtctggtggagagaaaaaacgcctttatcttctcaaactgctccttgaaaaaccaaatgttcttctcttggacgagccaaccaatgacctagacattgcgaccttgacagttttggagaattttttgcaaggctttgcaggtcctgtcttgacagttagccatgaccgctatttcttggataaggtagcgaccaagattctagcttttgaggatggcaagattcgtccattctttggtcattatactgactaccttgatgaaaaggcctttgaaacagagatggccaatcaagtgcaaaaggctgaaaaagaaaaagtggtcaaggtgcgagaagagaagaaacgcatgacctaccaagaaaagcaggagtgggcaaacattgaaggcgatattgaagccttggaaaatcgtatcgctgcgattgaagaggaaatgcaggctaacggctctgactttggcaaactagcgactctccaaaaagaactggatgagaaaaacgaggcactccttgaaaaatacgaacgctatgaatacctaagtgaatttgatagctaggagaatagaaaaatcccgtctcatgacaggatttctctattcttttttgtttcttggtgaaagatattttgccaagtttcgtgacggcgccagatactggtatggacgataccatctaactcatagcagatgagtttggtcttttgactgatggaagtgatctgaatatccttgatagctgaattcaaatctttttcggctttataggcctctttatccatctgctctccatcctgacgaatatagacaaaatcgtcagctaagagttcttccagttgatttccttggtcaatcaattgttcacgcataagtaattttttatagacattgtctaaaatttcgtcctcagggataggtgctggctcgatatggacatcggtatcaaaaactccaaaacgctcttccagcatggattcgacctgatccgcaatctcatgactttcataaactgataagtcaggattcatttccagggtgatatcaagatagatattgctaccgtaggtacgacctctttgggacttgaccttgctgattttgggaatttccatgatagctttttggtagtcctcaagcagacggtcgtcgaaaccatctgaaaggctaaaggaagactcgatgaagatatcataggcagttttcaagataaagaaagtgatgatgatggcgaccagtttgtccacaataggataattgaaactgctagcaagaatggcaatggtcgtaccaagtgatgtaacagcatcagaaagattatccttggcagctgctttcagtgccttggagttggatttcttactgaggcgagtattgtagagatagactatgaacataatcgctgcagaaatgattcccagagttgcgcccagaggatcaatgaccgtttcttcccggctgagaatcttttgaatggtatcctgcagcacatcaaagccaacataaaacataatgatggaagtgattaagctagccaaatcttcaatcttccagtgaccaaaacggtggtcacggtctgcaggctggcgtgccattcgaatcccaatcaagagggccacatttccaatgatatcggatacgttattgaaaccatctgccaccaaactggatgaatgaagaaggtggccagttgctaatttggctgcagacaagagcaggtaggtcgaaatgctgataatggcaccacgttccgccaacttgagatttgaaatagattgcttcattcaacttcctttctagtcacatagcattctaccattatactggttttcaagggaaaattcaaataaggcattttttactctttgaaaatttttcaaaatttggtataatagtactactcaagggagtagctggcagaaacctgtgatagtgtcgtcattccgaattttatactgaaaagtatgttttccggccctatcttaaacagcgagacttgttatgattaacaggtctctttttgtttgtcgtgaaaagatacgatgaggaaaagagagtctgtttagcacacaatgtcaaggaggagacacatgtcaaaagaacaaaaacgccaagcgttttacactcaaagtcctgaagaggtcttgaaggctgtggatgcgaccgagcaaggtttgtcatcaagcgaggcagaaaaacgccttgccgaatttggccacaatgaactcgaagagggtgagaaacgatcaatcctggtcaaattcatcgaacagtttaaggatttgatgattatcatcctagttgcggcagctatcttgtcagtcgtgacttctggtggagaagatattgcagatgccatcattatcctagccgtggttatcatcaatgctgccttcggtgtttatcaagaaggaaaagcagaagaagctatcgaagccctcaaatccatgtcaagtccagctgcacgtgtccttcgtgatgggcatatggcggagattgactctaaagaattggtccctggagatatcgtttctcttgaagcaggtgacgtggtgccagcagacctacgtttgctagaagccaattctcttaaaatcgaagaagctgccttgacaggcgagtctgtgccagtcgaaaaagacttgacagtcgagcttgctgcagatgctggtattggtgaccgtgtcaatatggccttccaaaactcaaacgtgacctatggtcgtggaatgggtgttgttgttaatacaggtatgtacacagaagtcggtcatatcgcaggcatgcttcaagacgctgatgagacggatacacccctcaaacaaaacttgaacaatctttctaaggtcttgacctatgctatcttggttattgctcttgttacttttgtagtgggtgtcttcattcaagggaaaaatccacttggtgagttgatgacctctgttgcgcttgctgttgcagccatcccagaaggacttcctgctatcgtgaccatcgttcttgcccttggtacgcaagttttagccaaacgaaactctattgttcgtaagttgccagcagtagaaacccttggttcaactgaaatcatcgcttctgataagactggtacgctgaccatgaacaagatgaccgtcgaaaaagtcttctacgatgcaatcctacatgactcagctgatgatattgaactagggcttgaaatgccccttcttcgttcagttgtcttggccaatgatactaaaatagatgtggaaggcaacctgattggtgatccaaccgaaacagcctttatccagtatgccttggataagggttacgatgtcaaaggatttttagacaaatatcctcgtgtagctgaattgccatttgactctgaccgtaagctcatgtcaacggttcacccattgccagatggtaaattccttgtagcagtcaagggtgcgccagaccaactcttaaaacgttgtgttcttcgtgataaggctggggatattgctccgattgatgagaaagttacaaacctcattcatacaaacaattctgaaatggctcaccaagccttgcgtgtccttgctggtgcttataagattattgacagcattccagaaaacctcacttctgaagagcttgaaaatgatttaatctttactggtttgattgggatgattgaccctgaacgtcctgaggcagctgaggctgttcgtgtggctaaggaagcgggaattcgtccaatcatgattacgggtgatcaccaagacactgcagaagctattgccaaacgtttgggaatcattgatgcaaacgatacagaaggtcacgttttaactggtgctgagctcaacgaactgtcagatgaagactttgaaaaagtagttggtcaatactctgtttatgcccgtgtgtctccagaacacaaggttcgtatcgtcaaggcttggcaaaaacaaggtaaagtcgttgctatgacaggtgatggtgtcaatgatgcgccagctttgaaaacagcagacatcggtatcggtatgggaatcactggtacagaggtttctaagggggcatctgacatgattcttgcagatgataactttgcgaccatcatcgtcgcagttgaagaaggacgtaaggtcttctcaaacattcaaaagactattcagtatttgctttctgctaatactgctgaagtattgaccatcttcctatcaaccttgtttggttgggacgtcttgcagccagttcatcttttgtggatcaacttggtaacagataccttcccagctatcgctcttggtgttgaacctgctgagcctggtgtcatgaatcataaaccacgtggacgcaaggcaagcttcttctcaggtggtgttgtgagttctatcatctatcaaggtgtactccaagcagctattgttatgagtgtttatggacttgcgattgcttacccagttcatgtgggtgacaatcatgccattcatgcagatgccctaactatggcctttgcaacccttggcttgattcaactcttccatgcctacaatgtcaaatctgtttaccaatccatcttgacagttggtccattcaagtctaagacatttaactggtctatcttggtatccttcatccttctcatggcaacaatcgtcgtagaaccgcttgaaggaatcttccacgtaaccaaactagacttgtcacaatggggaatcgttatgggtggaagcttctcaatgattatcatcgtcgaaatcgttaaatttatccaacgtaaactcggttttgacaagaatgcgatttaaaaaaaagtcatcttcggatggcttttttaaataactttaaaaagaatagaaaaaactttaaaaaagagatgttaaatgtaatgccgcttactaaaatattaggtataagaatagtaaataataacttagggggaaatcatgggaagtaaaaaatgtatttactctatccgtaaattgagtttgggtgttgcttcagttgttgtggcttgtggtttaggttttttagctggctctgttgggagtgtatctgcagatgaaacgctcgcagctagtcatatcttagaaacagacaaaccttctagcgaaagcattgacaaggataagtctgtcgagggttcagaaaaagaagctactgcttcagaagagcaacattttgaagaaaaacatttagatactcctaaagtgactgaaaaggaatctcgtgttgaatttaattatattgatgaatcaacagggaaaaaacttttttcagatgagcgtactggtaaggtgggagaggatcttcactacgatacgagaaagaaaattagtgagttcaaatggaatggctatgtattggttgaagatggttatttgaaaacggatgaatcgaagaagctgtttcaagatgatcagactccgcaaacgtatactattaaattaactccaaaacatgaagtgattagcttacaaaaccagactaatcctaagtcaaatgaagaggtggaagctggtgttgtcgatagtcctaagtggcctgcagatgctgaaaagatcagaaccaatcaagaaaggcctttagagagaacgattcaaagaatcattaaatataaatataagaataatggtaaagaagcctttgctgagaaaaaacaaagtatttcctttgaacgctatgcgactgttaatcttgttactaaggaaatttcctattctaactggaaaataaaacaggagcatattaaaaatcaaacagccaagattagctatgtggatatcagtgaaaacaagctactgaaggaagatacagttactggggaatctggttatcctattgaatacagtacgctaaaaacgattagtgactacaagcgacaaggatacgatcttgtatcaagtgattatgatcgaggtttacaatattttgaccaagatagtaagactggtcaaatatttaaggttgctttaacccctcgcctagaatttatttatcctgaagatagaattccaactgctcataaaaaagttgatgaggatgttcaagattcacctttatggcctgccagtgtttctaaaatcgtcaataaaaaatctattgaccgaaacattgcttatcgagattttgtgacacatgataaggttgctgaagatcgaaatgatcaagttgatttcaaacgcgttgccaaggttgattttgtaagaggagacctttattatcgtgattggacgagtgatcaaccaaatctatctaaagtagcgacaccactgctaaaaggcttggtggcagataaagaagcagttgcagagaaaacagtggcagtaacagatcctgtaattagggaaactgtttactacaaacaattaggaaaatggatagccatttctccaactgcaaatgagaatgtggctttgattcaatatcccaatgaccaagatggtaatcctgctaaagcaggtcttgctagcaatccaggtttaggaacaatcccttatcttaaaggttataaggctgtgacatcagctactgatttggtgttgaaggattcttcgcatccagaattgggttacttattacctgaagtaccagaagattttacaaaagacacaataatcaattatctacctgtgaaagctactgagccagaaccaccaagaggtgatcaacccaagacgccagaagctccaacccctgaggagccaaagcacccagaagtaccgacggtagatcaacctaagaatcctgaaaaaccaacacctgaggaccctaaacagccgggagtgccgactgttgagcaaccaaaaactccagcaagtccagtacctgcggagccaaagcgccccgaagttccagctgttgctcaacctaaggttcccgaaaaaccatcccctaaggaacccaagcaacctgaagttccgactgctgagcaaccaaagactccagcaagtccagcgcctgaggagccaaagcacccagaaactccaataataagtgaaacaaaggaagctggtaaactaccagagacagctagtcatgattctattttgctagtagtcggattcttatcagccctatctggcgtcctattgtttaaagttaaaaaagattaagaatttacaaatagaaaaaaagtcatcttcggatggctttttgctacagtttagggaaagggcttgcagttatcggcttttgtgctataattgctataatatagtaaaaagtaagtggagtgtgaggaagtggagaagaaaattgtaaaggatattttgtttttatctcaggtgtctcagccggcaagtcaggaagacctttatcttgctagagatttgcaggatacgcttttagcaaatcgtgagacttgtgtcggtctggctgccaatatgattggggtgcagaagcgcgtgattatctttaatcttggcttggttcctgtggtcatgtttaacccagtgctcctgtcctctgaaggagtttatgagacagaggaaggttgtttgtccttgacaggtgtgagacctactaagcgttatgaaatcataagggttgcctattgtgacagcaagtggcaggaacagaccattactttgacaggcttcccggctcagatttgccagcatgaactggatcacttggaaggacgaatcatttaggaggaaagcaaatgaaacgaatagtctttgaacttatttttatcgcaacgacctggtatatctttttaccgcctcttaacctgaccagctgggaatttctctttttcctctgtgggcatttgctggttgtagcaatcttatttggctttggcaagggaatcaatctggtcaaaacggttcatgtgcgccacggaaaggcggaagctgccttaaatcttgagggtttcaaaatcaatcggttagggaaaatccttttagcttctattggaggaattcttctcttagcagccttggtttccttggtaacttctagcatttttcaggctaaaaattatgccaatgtagtcacggttacggaaaaagactttactgattttcctaagactgataccagtaaggttcctatcttagatagaagtaccgctgaaaaaattggggaccgctacttgggttccctaacagataaggtgtcgcagtacgtagcggcagatacctatacccaattgacaattgatgggaagccttatcgggttacaccactagaatacgcagatcctatcaagtggtttaataatcaggccaagggaatcggcgagtatatcaaggtagacatggtgactggaaatgcggacttggtggacttgaagacaccaatcaagtattcggattcggagtattttaaccgtgatgtcaagcgtcacctgcgcttgaagtacccaactaaaatcttcaagactccatcttttgaggtggacgatgaaggtaatcctttctatgtggctacggtttaccaaaagcaatttggacttgcggttccccgtcctgtttcagtcattatcttggatgctacaaatggagaaaccaaggaatacagcttatcagaagtcccagaatgggtagacagggtctatccagctgaggaaaccattgagcaaatcaactacaacggcaagtacaaggacggtttctggaatgctatgatttccaagaaaaacgtgacccagactaccaagggctataattacttgtctatcggcaatgacatctatctctacacaggtgtgacgtcggccaatgcagatgaaagtaatcttggttttatcctagaaaatatgcgaacaggagaaatcactaagtacagcttggcttctgcgaccgaagaatcagcccgtgaatcagccgaaggtgctgttcaggagaaatcctacaaggcaaccttcccaatcctcatcaacctcaatgacaagcctctctacatcatgggcttgaaggacaatgctggtttggtcaaagagtacgccttggttgatgcagtcgagtaccaaaatgttatcgtagctacgacagtggaagaactgctcagcaagtacgccaataaaaacgaccttgaaattgataatgaaacaacagaaagcattaagggtgtggtggcagacctcaaatcagctgttatcaagggcgacaccgtatatttctttaaagttgatggcaagatatacaaagtcaaggcctcagtctcagatgaccttccttaccttgaaaatggtaaaaccttcgaaggtcaagtaggaaaagacaactatctcaagacctttaaagtacagtaatactcttcgaaaatctcttcaaaccacgtcaacgtcgccttgccgtactcaagtacagcctgcggctagtttcctagtttgctctttgattttcattgagtataaaaaagctttatttaagaagtatatgttataataaggtaaattaagcctaatggaggacaaagaaatgggtttttatgtgatgcttgcttcaatgctactcggactgctcgctttgaagatargtttttctcagttcaaggagaaaaaagataaattcttatctatcttaacaagtttagctggcctagcccttgttctcgtggctgtctggttaggatggccaaaataaatagagaagcctcggtcaaaccgaggtttttcagatgaatttcttggtagtggcaaaaaaatatgctacactatcaatatgaaaattttaatcccaacagcaaaagaaatgaacacagacttgccaagtattgaagccactcctttaaaaccagaaagtcaggccgtgctggatgccttggctctctattctgttagtcaattggagagtttttacaaagtttcagccgagaaagctgtggcagaatttcaaaatatccaaactttaaaaaaacaaactgctcaacactatccagccttgaaactttttgatgggcttatgtaccgtcatatcaagcgagacaaactggacgaggcagaacaagcctatcttgaaaatcatgtcttcattacctcggccttgtacggtgttgttccagccttgtcacctatggcccctcaccgtttggactttttgatgaagttaaaagtcgctggtaagactttgaagagccattggaaggcagcctatgatgaggctatgaatggtgaagacctaattttctccctcttgtcgtcagagtttgaaactgtgttttctaaggaaatcagagaaaaaatggtgaccttcaaattcatggaggatagaggtggtcagctgaagattcactcaaccatttccaagaaagcgcgtggtgccttcctaacatctctaatagaaaatcaagtacaaactgtggaggaagcacgtcgcttgaactttgccggatttgcctaccgagaagatttgtcacaaccacaggaattggtttttgttaaggaagtttagaaatcagataagagaaaaagtcagcaggattatgctgacttttttctagcttataaagtattggacaaatgaatctcatttgataaagtattaagatgattaaccaaatccatgattgacagatgattttgacaaataaacttcttggtaattcctggaatatagaaattagacacgatgatatcataacctgtctgatttaaaatctcaggactcgtttccaattcatcccaagtatcgaaggtaaagcggttattacagtagtaggaaagcatatcaacaaaggtaagggatatagcatggtcaaaattactgataatcaaaaccttgataggtggtcgattttctaacaactgagtagagaggttttcagcatgggttaagatggtgtacatcaagtgttccaactgttcaggatggtcatgctgtccaattgcctgacgatattgggccagttcttgacgtgcacttcccataaagtctgggaagtaaacttcaaattttttaatcgtcaatgctttttgttcaaataagattggggtagaaaagatttcctgtctttcaaagaaagcagtgttgtgtaaatgccaaatcagctcatcgtggttagtaaaagtaatcttatattgttttgctaggcgttctaatatttgactaagtaattggtaagagtatcttgcttcactgttatcttctaaagagttgaagaattcttgaggatctaagaaaagattgttttgaataaaggatataaaaatttgggcaatgatatctggggtgatttccagtcccagtttttcagaaaaatggacaagtatctcctcaaagtttggaatactcatcaaaagagggtagtattcatcgtagaaatgatttggtaagtcgatgaaatgaccgtttttaatgcggtaaatactgatggctatcatcaatttgtacattctatagattgaaaatcgcattggataattcgtgatcttatagaagaagtcagtgaactctgttaaatcctcttcaggaaggtcaggaaaaggccagtctaggaaataatagcgctcagaaaaatattgggcaaaaaaatagcgaatatcgatttcattgccacgtatttcggatggagtaaatgatagttcaatttggaattgagttgacagagtttttgtaatatttctgcccaatcgatagaggttggcattactagagtgaagattttctatcgttcgataaataggtaacccctcattgaagaacatatactctagtaattgaaaagattgagaatgggcaagaaaatgttgatatacatcttccacgctagtctgcatatctaaatctatcataattccgttaatagaagattggatatcgatagttggaaaggcggtacgtaattcatttaaatcactttttagaattcgttctgtacatcctaaattgtcagcgagttcatgtaatctcatccaattacgattctggattaagatctccattaagcgtagttgtctttgagcttttgtggataaaaggttgcgcatgtaggtaatttcctccaaatttcattatatcatattattgtctaaagtgtacaaaaatgttggagtagaaaaagtgtctgaattagtcagaaaaattagaataatataagtggcttttaggtacaaaaagagaatatattaattacatagaaaatattgatttatatatcaaatagttgtagagtgagaactataaaatactatctaggagttcacaatgaaacattcacataaaaaatcatttgactggtatagcttgcaacaaagatactctattcgtaagtatcactttggtgcagcgagtgtcttgctcgggacggccttagtcttgggaactgctgccaatgcccaagcagtacaagcagaggaaaaaaatccagaagctactaacagtgtttctgttgataaggtagaagaagctaccaaaccagcagaagtttctacagctaagaaagaaacaacctatgcagctccaacggttgctaatccagtagaagtaactccagctaaatctgaagatgctaaagcaccagcagaaaaagttgaagaagcaaaagataaaaaagaagaagtaagtcatcaagatgctgttgacaagtcaaaattgttaacggctctttcgcgtgcagaaaaattggagcttaagttatatactgaagatagtgtaaaacgccttcaaaatagtatccaatctgctaaaggattattaaataaagcagatgtgacagagtcagaattatctcaagcagagtctgatcttcaagcagcagttatcgctttggaacttagagggacaactaaagttgctgataaagctgaagtagtgagtaaaattgaatcagttgaaacgaaaaatgctgaatcaaaagtaactgaacaaacttctaaggtagaaaaagataaaagcgccttaaaacctgttaaaggactccgagtagaagatgcaaaggccaataaagaaggcggatggaatattcccttagaccaagaagcccgcttgcaattaaagagtgctattgaagcccatgcagcacaatcacgttcacgtcgccggaaacgtgatattggagatttggactatactttcaagaaagttatgactccagtcaatccaggtcattatgcagatgctaagagtgtggatgagttaacagttaatccagattttacccctgagacagaaatcaacgtttggtataaggatttaggttatatcaatctagtcgataaaaatggacattacatcaattcaaatggtgaagtagtagaaaataaagaagcagctattcgtcgacaatataaaaacgactttaatgatacaacaagagcagatgtaactgaaattcctaatgcaccagttggttggaaaattagtgacaaccaatctattcgtggatatgatgcagaaacaaaaactattgatccaaacgacgataatgatttagatgctgttggtaaagattctaatgtagtcattgaaaaagaaaatcaaaaagctgttatccgttatgtaagcactaatggtaatcaagttctcaaaacagatgaagtgacaggtaagtcaggtgaagccattgcctacagcacaacaagtcaaatcaatgaattcaagaaacaaggctacaagcttgttagcgatgaattcacagcaggtggtgctaaggtttatgactatgatacagcacgtgaccaagtctacactgtaaccctttcagaacgtgttgaaccggttaacccagataacccaaatccacaaccaaatacaccagttaatccaggacaaccagatagcccacgttggccaggaaccgttgaaaacttggataacaaggaaagtgttagccgtactatccattatgtttatgaagatggaagtaaggctaaggatgatgtggttgaaacactgaacttcaaacgttggagtaatgtcaacttggtaacaggtcatatcgacttccaagactggacaactaatgatgatacgtttgataaagtagtctctccaactatcgcaggttacacagcggataaatcagaaatcccagctgtaagtggagttcaagcgaaagaccaagaccgtgttgaaacagtcacttatcataaggatgcccaaaaagctgttatccgttatgtaagcactaatggtaatcaagttctcaaaacagatgaagtaacaggtaagtcaggagaagccattgcctacagcactacaagtcaaatcacagagttcaagaaacaaggctacaagcttgttagcgatgaattcacagcaggtggtgctaaggtttatgactacgatacagcacgtgaccaagtctacactgtaaccctttcagaacgtgttgaaccggttaacccagataacccaagcccacaaccaaatacaccagtcaatccaggacaaccagatagcccacgttggccaggaaccgttgaaaacttggataacaaggaaagtgttagccgtactatccattacgtttatgaagacggaagtcaggctaaggatgatgtggttgaaacactgaacttcaaacgttggagtaatgtcaacttggtaacaggtcatattgacttccaagactggacaactaatgatgatacgtttgataaagtagtctctccaactatcgcaggttacacagcggataaatcagaaatcccagctgtaagtggagttcaagcgaaagaccaagaccgtgttgaaacagtcacttatcataaggatgcccaaaaagctgttatccgttatgtaagcactaatggtaatcaagttctcaaaacagatgaagtgacaggtaagtcaggtgaagccattgcctacagcactacaagtcaaatcacagaattcaagaaacaaggatataaccttgttagcgatgaattcacagcgggtggtgctaaggtttatgactatgatacagcacgtgaccaagtctacactgtaaccctttcagaacgtgttgaaccggttaacccagataacccaaatccacaaccaaatacaccagttaatccaggacaaccagatagcccacgttggccaggaaccgttgaaaacttggataacaaggaaagtgttagccgtactatccattacgtttatgaagacggaagtcaggctaaggatgatgtggttgaaacactgaacttcaaacgttggagcaatgtcaacttggtaacaggtcatattgacttccaagactggacaactaatgatgatacgtttgataaagtagtctctccaactatcgcaggttacacagcggataaatcagaaatcccagctgtaagtggagttcaagcgaaagaccaagaccgtgttgaaacagtcacttatcataaggatgcccaaaaagctgttatccgttatgtaagcactaatggtaatcaagttctcaaaacagatgaagtaacaggtaagtcaggagaagccattgcctacagcacaacaagtcaaatcacagagttcaagaaacaaggctacaagcttgttagcgatgaattcacagcaggtggtgctaaggtttatgactacgatacagcacgtgaccaagtctacactgtaaccctttcagaacgtgttgaaccggttaacccagataacccaagcccacaaccaaatacaccagttaatccaggacaaccagatagcccacgttggccaggaaccgttgaaaacttggataacaaggaaagtgttagccgtactatccattatgtttatgaagatggaagtaaggctaaggatgatgtggttgaaacactgaacttcaaacgttggagtaatgtcaacttggtaacaggtcatatcgacttccaagactggacaactaatgatgatacgtttgataaagtagtctctccaactatcgcaggttacacagcggataaatcagaaatcccagctgtaagtggagttcaagcgaaagaccaagaccgtgttgaaacagtcacttatcataaggatgcccaaaaagctgttatccgttatgtaagcactaatggtaatcaagttctcaaaacagatgaagtaacaggtaagtcaggtgaagccattgcctacagcactacaagtcaaatcacagaattcaagaaacaaggatataaccttgtcagcgatgaattcacagcgggtggtgctaaggtttatgactatgatacagcacgtgaccaagtctacactgtaaccctttcagaacgtgttgaaccggttaacccagataacccaagcccacaaccaaatacaccagtcaatccaggacaaccagatagtccacgttggccagctagtgtccatgatttagataacaaagaaagcgttagccgtactatccattacgtttatgaagatggaagtaaggctaaggatgatgtggttgaaacactgaacttcaaacgttggagtcgtattaacctagtgactggtcaaattttcttccaagactggacaactaatgatgatacgtttgataaagtagtctctccaactatcgcaggttacacagcagataaatcagaaatcccagctgtaagtggagttcaagcgaaagaccaagaccgtgttgaaacagtcacttatcataaggatgcccaaaaagctgttattcgctatgtaagcactaatggtaatcaagttctcaaaatagatgaagtgacaggtaagtcaggtgaagccattgcctacagcactacaagtcaaatcaatgaattcaagaaacaaggctatacgcttgtcagcgatgaattcacagcgggtggtgctaaggtttatgactatgatacagcacgtgaccaagtctacactgtaaccctttcagaacgtgttgaaccggttaacccagataacccaaatccacaaccaaatacaccagttaatccaggacaaccagatagcccacgttggccagctagtgtccatgatttggataacaaagaaagcgttagccgtaccatccattacgtttatgaagatggaagtaaggctaaggatgatgtggttgaaacactgaacttcaaacgttggagtcgtattaacctagtgactggtcaaattttcttccaagactggaccactaatgatgatacgtttgataaagtagtctctccaactatcgcaggttacacagcagataaatcagaaatcccagctgtaagtggagttcaagcgaaagatcaagaccgcgttgaaacagtcacttatcgtaaggatgcccaaaaagctgttatccgttacgtaagcactaacggcaatcatgttctcaaaacagatgaagtgacaggtaagtcaggcgaagccattgcttacagtacaacaagtcaaatcacagaattcaagaaacaaggctataaccttgttagtgatgaattcacagcgggtggtgcgaaggtttatgactacgatacagcacgtgaccaagtctacactgtaaccctttcagaacgtgtcgaacgtgtaacaccgaaagatcctaaaccacaacccaacacaccagtcaatccaggacaaccaaatacaccaaattggccaggtactgttgagagaatggagaaattgacccaaacaataagtcgtcgtattaatttccgttactacacaaatgggaaagctgcgtatggatcaattgatcaacatatcagttatgaacgaaatgcacttgtgaatttggtttctggtgatattaattatgaacaatggaagattaaggctattaagaaccaagacattgtagctccagtagcatctcaaccagctgtttcaactccaacggttgtcaacaatagtgaatcaagagttgctagatcatctagaagcagacgagcattgtcagaagtagctcctgttttagaaaatactttagctacacaagttcataattctcaagtgtctccattaggtttaactgtgacagaaaatggtgagcgttctgtacgccgttcatcaagaggtaaacgtgctgctgtagcggaatcaactacttcaaataattcagaagcggattcatctgttaatgctgtcttcaaagctgtacgaactcctattacaccaaaatactatgctactgtgaataaagtagggacgatggaggttaatccaaattctcctcaagatacagaagttaatgttgacttgaaagaaatgggacgcattgttgcagttaatgaaaaaggtcaatatataaatgccgaaggtgaggtcgttaaaaatattgacgatgcactatataagtattatgataacgatcctaatgacgctactagagcaggcattacaaagataccagatgcaccacatttttatgctttccataaagaacaaccaaatgtctggggatatagcataacggatagaacagttgatccaaatgatgattcagatcctgaccgtatcggtaagaatacattaatttcttatgatgcaattattgatccagtgtctaaggaaacaaaccaaacggtaagctttactggtgcaggttctgaaactcctaaagataatgttcaaaatgactttgtcttcaaggggtcatataatgaagcaactaaagaaacaacttgggaaaacaagaaccatacctatggaacagttaaagtaccagttgtgacaggatattttgctgataaagcagaagctggtgctaagacagttacgccagattcaccaaaagcaacagatacagttacatataaagctttgggtaaaatcattccagtagatgcttctggaaatgtgattgcaaatgctcctcaaccacaatacctgaatgatgcaaatgatcctcgtaaagctggagaaacagcagtacctgaaattgtaggctacaaaccagagcgtacaagtgttacacctgaaaatccaggtgaagatacaaaggtaacttacgtcaagacagatcaagttgcagtagttcgttatatagatatggataataaggatgaggtcgttcatacagacaatattactggtaaatctggagaaaagattgcctatacgacagaaactgttttgaaatcgttgattgaaaaagggtacttattgaaggaagatggtttccctacagatgcaacttttgatacagatgaaacaaaagttcaagaatatacagttctattgaaacataagattactgttaaaaaagatactccaaaacttgtggaaagaacgattcattatgtatttgcagatggtacaaaagcaagtgaagatcaccatgatcaagtaagcttttcacgtatgttaagtatcgataatgtaacaggtaaaactacaagtacatcttgggtttctgaagatggggtaacaagttttgacgaagtgatatctccaagcattgcaggatacaatcctgatcttgctaaggtagattcggttcaaggaattacagcagaaactgaaaatcaagttgtaactgtaacttatagaaatgttcaaccaattccacaagttacaccaactccaattccgactccaaccccaaccccacaagttacgccggatccagtaccgactccaactccaactccggttccaaccccggtaccgactccaactccacaggttatgccgtcaccaaccccaaatccaactccagttccaactccaaccccggctccacatgtgccgtcagaagttccaaaccaaactccagttgctagagagaatgaaaaagaacttcctaaaactgcaggtcactcttctggtatggctcatgttctgggagtatttggcttaattgctggatttagtttagttggaaaagcaaaaagagatgaataaaatcaaaacaaaactctaggcaacaaaatattgtaagtgtagtgttttagggagtgagaatgtatgtcaatacagcatcaattccactcccttttttatcataaaatagttagagagaaaaaatatgtattcaagagtaaaacggaatcaaatgaataaggtaaacaagtattccattagaaaatcaagttttggtgcagtatctgttgctgtagctgccttgatggtttttggtgcttattcaggtgtgagtgcagatgaacagaaagtagattcacatcgaactgaaaaagaggaacaaaaagtctctgaaaaacctgacgagactaagcaaaaaaattcagaggaaaaaatagcagaattgccttccgctcttcaaactccagttttggaaaaagaagaattagatgtcaatgcccttctaaagaaagaagcagaatctaaagtggcagctgagacaaaaaatgctgactcaaaagaattaacttctaaagaagtaaaacctagcgaagaaaaaactacttcacctgcttcaagtgaaaaggtaaatgaagaaaaatcagtcgaaaaaactactctggatcaggttgtatcagaagcagaagttttaaatcaagtcgctttacgttattctcaagaagcagaacgtaaagctgaagaaaaagccttagttcaagccgctgttaagacagccaccattcagatttcacaatcaaaagccttattaaaagattcatctgttagtgcagaaaatcttaagactcaattaaatcaactgtattcagctatcgaaacagtgtatactgagttgcaacgtgcaggacatggcaagaaaattagcgctagtctatcgccaattcaaacacaagatgtagctatcgataatggaaatattattgccaatggtacaatcgatatggcggaccgtgtgacttcaacaggtattgctgattatcgtttccaattaaaatttaaaaatggtgcctatcataagggggatatcttcacaattggcttgaaggaattaccacaagacaataatcttcctcaaaaattggttgctgaaggtaaagtatttgcagaacgagtgagtctgattcagaaaaatgataatgccaaagctggaagcctttcatactgggcttcacgtggagatcgtgacgttgctttggacactaaagaatcatgggatttagttgacaaaggaagtcatattgaagcaacataccgtttcactgacgaaattgaacgcttagacgatgttacttttgaacttcaatacagaggtggaattcgttatcctagagtgaatgtggataagtctgtaactggtgttatctcagttaatggtcaaaatgtagtcactaagaattacactgtgattaaaacagatatcggagcacctaaagtttatgatacacctactacagctaacttcacaggtgatgtgatgttggatgatgatggaagtatcaagacatacaacagtacccttcgtatcggaacatggaaatcaaactttagtgcagggactcgtttcactgttcgtattaaagatacagaattcaataagtttgctactgttggtgaatttattgagcgtggtgcccacaatgtcgaaatgataaatactagccctgatacatcaagaacaagggtaaatcgccataatgttatcttggaagcacctcgtgaagagcctggtcaacatgccaaattcaagattcttaaggcagcagataatgaattaacctttgaattggtatctggaaagatgttggctggaagaacttatgtattacgtacaaaagattttggagttgatcgtgttccgacaagtcacacagttaattatctgaatgaagctagaaatggttttaaatcgaatgttccagggacattgacagtggttgatgccaaaggtaaaaatcttacagaccaatacgaacaagctgctgattctgactggaaaattgctaacccagatatggttagaacagatggacgccttgtatatggagatgtagctgttcgcttcgttgatactcaagggaaaatgcttcttcctgccattgcagcggtggaaaatggaggtatccttcaagacaaattcactactgtaagaccatctaccaaaattgatactagctatgtagctactttggagagaaatacaactgagacagaagttcaagaaaacaaaggaattcaaacaacatctatcacagcaccttatttattgcattcaccaaatggtaaatattatgtcttcaaagagtatgcacagaatgatcgtttctatagcaatacgaagacatctggtacgattacacgagctcaagccaacgtggtagctgtgtacgaagaagctaaatttggtaaagttgatattcagtatcgtgataaaacaagtcaagctattttagaaacattcaatacaccacatgataagagttcaaatctcattaacttgttgggaaataactatgatgtgactgctaaagttcctgaacgtttcgaaaaagatggtgtagtatatgtcttgtcacaaacacctgctaatagtaagggacatttgacacaggctgatatccatgttgtttatgattatcttgctcaacaaaaagcacaggttaaatacctcaatcaaacagaaacaagtcctaaagttttaggaaatgtggatagtgtagttggtcttccaggtgaaacaattgcttataattcaaaaactcgtattaatcaatacctaaaacaaggatatgaattagtacatgacggttttgcaaatgctaatgataaacgctttgacagtgaaaaacaaactgatcaagtattctcagttcaattaatcgaaaaagttatgactgtcacagcagatgatcctaaaccaattgctggaaatccattggtagcaggagatgcattgtcacctgtttggcctaaatcggttgaaaacttagatacactgagaaaaatgaccaagcagaccattcactacaaatatctaaaagatggtaaaaaagctttcaaagatgtagttcgatctgtagtttttgaaagagtggcgagagttaacctcgttactggtgcagttatttatgataattggaaaatcacaagaattgatgataaaccagtagcgtcagtggatacgactgttcataaaccaaatgtcactccacaaggagtaacaactattgcagcaactccttctagtctagggaatggaatttctatcaaaccagttttgactgttccgaatccagttgttgcatcatcaccaattgttgcaaaacccgttgtaccggtcaagccagtaacaccggttaaaccagcagtgtcaactccggccaagccagcgcctgtcgttaaaccaaaaccggtagcaccagtaacacctgtcaaaccagtagtttcgacaccagtaactccagcgcctgttgccacaccacaaccagttgctccagtgaaaccagtagcacctgcaccggtaacacctgttaaaccagtagtatctactccagctacaccaacaccagctgtgcaaccaaagccggtagcgactactgattcaaaacctagcttaactccagctgaagccttggctgcaattaaaccaacagatttttcttcacaaacatctgttaataagaaaacagagacaacacctgttcctggtggaacggctacgactacaactacaacgacaaccactgttacctcaaatgcggcaacagcaggtccaacaacaccgattgtcactatcacgacaaatgagaccgaaactcattcagaggtgacaagtgtcattcatactggtactaccagccacacgcatgtagtcggagttgttacaaaaccaaatgtagttgttactcatccaaaaccaagtgttcagcctaaaccgcatttaacgagacctcatcatggaccagtacaccatgttccttcacgtccaggtaaacaagttaaaccaattagaactggaccaggaactcgtggtcatgctagaagacatcgctaaatataaagtgttaatactgatttaactagtaggatagtataatctaaataaaatagagtttataaaaatgagtaacttaatataaaagttgctcattttttgataataaaatgaatttagtaattttctggattagtaaattatttttacaaaaatataacaaatcttataaacaatatattatgtatcgaaagggtttgcatataaggaaataaaagaatataatatatacaagaagtaattttataatttgaagcaaggagttcttaatgttttttaatcgaaaaggaatcaatcaaaagaattggcggatgataaagaaagggaagcattttctttttgggtgcactctttttttggctaccggagcagtgacgatacagaatccacatcttgttcatgctgatgaaatggttgcgtctctgaatgattcaactaaagttaaagatgaagatccgaatagtgacaagattccaaacgatgtggaaaatcatccacaggtagaaaatcctgttaaagaatcagataagatttctgaacatgttccagaagaaaaaattcttgaaaagtctttagagcatccagtcaaagctgtggataaaactgctttaaatgaattaattgaaaagattaggaacactgatttacagactaaaacagctaaatcagttgaaaatcttaatctctctttgtcgcgtgcgcaagcagtcttggataaagaaggtgctagtcaggatgagatagataaagaagttcaagctttgtctgaatcatttgctcaactggaagagaaaagcaacgacatagacaaaaaagaaaagcaagcagacaaagcaaacgatagtgatgaaaagaaaaatccttcaacagaaaagatcgctaaggttcaggctcttgtttcagaaattaaccaactggcaggagaaatcagttatgaattcagtgaatctgaaagcaaatctcttcaagtatttgcagatttatctgagggaaaagccactgagagtgaagttgatggtgctctaaatgaagcgaagagcctccgcaacaaagtagctaatagagtaactcgagcacaatctgggaaacgtgatccacggaatggaaaaccaattgatggtaagggagagagtgggtttagagctatttggatatcgtcaattgctaacaaatacgagggtagtaatgcgttagtaaacgaaaataaaaaagaattaactttttataattcagatactctattctcggtaatgacagcatatggtaaaagaggaaatggagagccattagtaagatatccgaatggccctaaacgtggagaggaagatcctactccgtattatgtaaaaagagtaggagttataagtggtcttaatcaagttaaaggtttaaaactacgtgtagcttataaaaatttccaaacaggaaagaaagaagaagtagatattgctgctaactattggaatgtaaataatcctgaagtgcaaatggctcttgttggaactataggtgatggtggaaatgtaacaccaggtacttatcatattacaattggagcaaatgggacacataaacaaaatacaattacctatactttgactatcaaacctcaaagtgaacgtaatactgttagagatttaacgccaacttatgtggatgatgtccgtcatttaacggaaacagaaaaaaatgctttgattgaaaaatttaaagcagagcatccaaatgtggttaatcgtgcgaatcatatcgactttgaccatgctgaggtatcagctgatggtgcaacaatgacgattcattttaaagatggattcaaccctaaaaccattcaaacaaatgcgacaaatgatgtagaagcgaaacattccagtttgactgcttattttggggattcaaaagaattatatacgaatccaagagaattagtacgatcaaaaacaggacatgaagtaccaacaacggctcaggtaacgtataaaacaccatttaacttgcaagaagcagggacaagaaatgttgttgtcacaacaacttatgaaaatggagtaacaaaagatgtaacaactccttatacagttttagattttctaggaaaacaagataaaaaaattaatcagaatcagtctggtcaactaggggatgctagaaattacgtgacagtttcagataattcagcagttccaggagaattaacagttcgttggaaaggtggctcttctaatgtggatacctctgcagcaggtgtacaacataaagaaatcgaaattcttcgtggtagtcatttaatgaaaactgtgaatgtcccagttgagattgtagataatattaaaccgacaattactgcccctgataatattacattaacgagattagaaggactacctagtgaaatcaatattcacgctcaagataatgataaaggagtaggtctcaaagaaagtaactctgtaacggttgacaatctaccgaatccattatcttacaatgcaaaaaaatcaaaaattgaaattaatggcgttattccaaataatttccaacttggtaaatcaagtattcaagtgactgttaaagcggttgataaaaaagaaaatactgcgactaaaaatattactttccatattcaatctcaaacacaaaaatatacagcagttgctaattctcaaattcaagaagtgagttatggggaagcgcctgatgcaggaacaagtattcaaaaaaatgggctgccaacaggtacaagatacggatgggcaacacaacctaatacggcaacaggccctggggatcaaaccgaagtcgtaactgtaacctatccagatggctcaacagatacagtacctgtaaccgtgaaagtccgtaaactaagtgatgaacatataccaactggaaagacaattactgtgaatcaaaatgatccagtaacgaatgatagattaaaagcagcagtaacagtggataatggtggaactagaaaagtcaagtcagttactgcagcgcctataagcactgtgcatgcaggctcacaaaccataaaagcgacagtaacttatctggataataccactgatccagttgatattcctctagaagtaaaagacgtaattgctccaacaattcaaacaccaacagaaggtcaaacatgggaaatcacagcattagataagacattgccacctattaaagtagcagttgctgataatcctggaggaagtggaataaagagtattgttccaatgaacttaccaagtttcttgaagtatgataaagcgacaagtagcatcgttttccaagatggagaacgtgaagttccaaaattgtctggaagaactcgaactacaagaaatataacattacgtgtggaagataatgcaggaaatagtagtgaacgaacatttagtattactcacatgcctatggctgaaaagtataatccacaagcgaatgcaacgattcaagaagtgagccatggtgaaactcctaatccgaaaacaagtgtgaatacagcaggattaccgactgatgctcaatatacatggaaatctgcaccagatacgaatagacctggaaataaaacaggagtcgtgaaagttacttatccagacgattcagtagatgaagtaacggttactgtaaaagttcgtaagctaagtgatgagtatgaacctacagctacaaaaattgtcaaaaatcaaaacgatactgtctcagaacaagacttaaaatctgctgtgacaattaataaaaacggtaatagtaaggtgaaaactgttactcctgttgggaaaattagtactgctgagacagggaacaaagaaatttcagcaacggtaacctatctcgatgatacaagggatacggtaacaattcctttagaagtaaaagatgtaacggctccaacgattcaaacaccagcgaatggtcagaatatcgatttaatagcattagataaagcattttctccaattaaagtaacatctgaagacaatgcaggaggaagtggtgttcggtcaacaacggtaacagacttaccagatttcttaacttatgatgatgcgaataaaaccattaagtttaaagatggtactcaagaagttccaaaattaccagttggtacagattctcaaacacatacagctacaattcgagtgacagataatgcgaataatagtagtacttcacaattaacgtttactgtgaaatcaatgactaccaaatatgatgcaacagcaaatccgaacaaacaaacagtgagttatggggcaactccagatgcaggaacaagcgtgaatcaaacaggcttaccggaagggacaagttatgcttggaaaacaccaccagtaacgaccgatgggcctggagaaaaagatggtgtagtagaagtaaagtataaagacggttcgaaagatatcgtaaatgtaaaagttactgtaaaaggacttagctcagaatacgaagtaactggaacgctaattgaagtaaatcaaaatgattcagtttcaaatgacgacttaaaagcgaaagtaactgcaacttcaaaagcaggaaatgtgaatggaacagataagatttcaacagttacagcacctacaatcagcacagctaactatggtgaacaaactattaacgctacagtaactttcaaagatggaacaactaaagaagtgaccattcctctgaaagttaaagacgtgacaccaccaacaatccaatcaccagcagaaaatacaaactgggaaatgacagcattagacaaagctttaccaaatatggaagtaagagcggaagataatgaaaacggaagtggaattaaaaacgttactgtgacaggcttgcctgattacttagaatatgatagtacaactaacgctattaaattcaaatcaggaaaacaaacagtagaaaaactagctgagaatacaccaagtcaagaatttactttaaacattcgagcagaagacaaagcaggaaatgtcagcgaaagaactgcgaaaatcactgtatcttcaatgagtaccaagaatactccaacgccaatttcacaaaatacaagttatggacaagtgccagatcctaataaaagtgtagataaagcaggcttaccagaaggcacaaccgtcacatggaaagaaactccagttgtgaatacaccaggaagtcatccaggagtagccttagttcattatccagatggaacggaagatgaagtagaagtaccagtcacagttaagaaacaaagtgacaccttcaacccaacggcaaaagaaccgaaccaaactgtgcgtcacaacgaagtaccagatccagagaaaagtattaatacaaacgacttaccaaaaggaacaaactatagctggtcagaacaaccagacacaagtaaaccaggaagtaagacaggaaaagtattaatcacttacccagataagagtacggaagaagtgacggtaacggtaaacgtaacgcctcaaaatgatgaatacacaccaactggaatccctcaagaagtggacaatggacacgtaccagatccagaaacaagtgtaaccaaaaccggcttaccagaaggcacaactgttacatggaagacaaggccagatgtcagcacaccgggcagtcatccaggagtagcgttagttcattatccagatggaacggaagatgaagtcgaagtaccagtaagggtaaaagaacaaaaagataccttcaacccaacggcaaaagaaccgaaccaaactgtgcgtcacaacgaagtaccagatccagagaaaagtattaatacaaacgacttaccaaaaggaacaaactatagctggtccgaacaaccagacacaagtaaaccaggaagtaagacaggaaaagtattaatcacttacccagataagagtacggaagaagtgacggtaacggtaaacgtaacgcctcaaaatgatgaatacacaccaactggaatccctcaagaagtggacaatggacacgtaccagatccagaaacaagtgtaaccaaaaccggcttaccagaaggcacaactgttacatggaagacaaggccagatgtcagcacaccaggcagtcatccaggagtagccttagttcattatccagatggaacggaagatgaagtagaaattcctgtcacagttaagaaacaaagtgacaccttcaacccaacggcaaaagaaccgaaccaaactgttcgtcacaacgaagtaccagatccagagaaaagtattaatacaaatgacttaccaaaaggaacaaactatagctggtcagaacaaccagacacaagtaaaccaggaagtaagacaggaaaagtattaatcacctatccagaccatagtacggaagaagtgacggtaacggtaaacgtaactccacaaaatgatgaatacagcccaactggtattgcgcaaaccgtagacaatggacatgtgccagatccagaaacaagtgtaaacaaaacaggcttaccagaaggcacaaccgtcacatggaaagaaactccagttgtgaatacaccaggaagtcatccaggagtagccttagttcattatccagatggaacggaagatgaagtagaagtaccagtcacagttaagaaacaaagtgacaccttcaacccaacggcaaaagaaccgaaccaaactgttcgtcacaacgaagtaccagatccagagaaaagtattaatacaaacgacttaccaaaaggaacaaactatagctggtcagaacaaccagacacaagtaaaccaggaagtaagacaggaaaagtattaatcacttacccagataagagtacggaagaagtgacggtaacggtaaacgtaacgcctcaaaatgatgaatacacaccaactggaatccctcaagaagtggacaatggacacgtaccagatccagaaacaagtgtaaccaaaaccggcttaccagaaggcacaactgttacatggaagacaaggccagatgtcagcacaccgggcagtcatccaggagtagcgttagttcattatccagatggaacggaagatgaagtcgaagtaccagtaagggtaaaagaacaaaaagataccttcaacccaacggcaaaagaaccgaaccaaactgtgcgtcacaacgaagtaccagatccagagaaaagtattaatacaaacgacttaccaaaaggaacaaactatagctggtccgaacaaccagacacaagtaaaccaggaagtaagacaggaaaagtattaatcacttacccagataagagtacggaagaagtgacggtaacggtaaacgtaacgcctcaaaatgatgaatacacaccaactggaatccctcaagaagtggacaatggacacgtaccagatccagaaacaagtgtaaccaaaaccggcttaccagaaggcacaactgttacatggaagacaaggccagatgtcagcacaccaggcagtcatccaggagtagccttagttcattatccagatggaacggaagatgaagtagaaattcctgtcacagttaagaaacaaagtgacaccttcaacccaacggcaaaagaaccgaaccaaactgttcgtcacaacgaagtaccagatccagagaaaagtattaatacaaatgacttaccaaaaggaacaaactatagctggtcagaacaaccagacacaagtaaaccaggaagtaagacaggaaaagtattaatcacctatccagaccatagtacggaagaagtgacggtaacggtaaacgtaactccacaaaatgatgaatacagcccaactggtattgcgcaaaccgtagacaatggacatgtgccagatccagaaacaagtgtaaacaaaacaggcttaccagaaggcacaaccgtcacatggaaagaaactccagttgtgaatacaccaggaagtcatccaggagtagccttagttcattatccagatggaacggaagatgaagtagaagtaccagtcacagttaagaaacaaagtgacaccttcaacccaacggcaaaagaaccgaaccaaactgttcgtcacaacgaagtaccagatccagagaaaagtattaatacaaacgacttaccaaaaggaacaaactatagctggtcagaacaaccagacacaagtaaaccaggaagtaagacaggaaaagtattaatcacttacccagataagagtacggaagaagtgacggtaacggtaaacgtaacgcctcaaaatgatgaatacacaccaactggaatccctcaagaagtggacaatggacacgtaccagatccagaaacaagtgtaaccaaaaccggcttaccagaaggcacaactgttacatggaagacaaggccagatgtcagcacaccgggcagtcatccaggagtagcgttagttcattatccagatggaacggaagatgaagtcgaagtaccagtaagggtaaaagaacaaaaagataccttcaacccaacggcaaaagaaccgaaccaaactgttcgtcacaacgaagtaccagatccagagaaaagtattaatacaaatgacttaccaaaaggaacaaactatagctggtcagaacaaccagacacaagtaaaccaggaagtaagacaggaaaagtattaatcacttacccagataagagtacggaagaagtgacggtaacagtcgaagtaacgccacaaaaagacgattacgatccacagccaaaaacacaaacggtagaacatgctcaagtaccatctgcaaaagatagtattgaaaatgtaaaaacgttaccagaaggaacgacttttggatggaaagatggaaaaattccagatacttcaaaacatggggagaaaaaaggtgttgtaactgtaacgtatccagatggaagtacagaagatgttgatgttgtaatcactgtgaatccagaagatttcagtccagtagttccgatggagaaagtaccagtgaaaaatcctgagaacttaagtccagaagaacaagataaagtgaaagaaaaagtgacaaaagcaaatccaggaaaagacgtaacagttgattcaaaaggaaatgtaacaattacagatccggagacaaaagtaagtcatgaaatttctcgagataaattagtttttgcatatgcaaaaggtgaaccagaaacttcgaaaatccctgaatttaatggcggagtgaacgcaccagattcgccagttcatgaagttccagagtttgcaggtggagtaaatggtgagccagaaattcaagaaaccttaccggaatttaatggcggagtgaacgcaccaaattcaccaacacatgaagtcccagaattcaatggaggtgtaaatggtgagcttcctgatccagtagaagtatctaaaattcaactgatgatcaccaagtgggttgatgaaaatggaaaagaattgaaaccagcggatgccaaagcaccaaaggtattaggtgaagccaatgaagcatttgaacatggtgaaattgaagggtatgtatttgtaagaacagaaactaaaggtgatgttgtaactcacatcttcaggaaagtgagtccagtcagaccaacaggtgacggtcaacaaagaccagctacaccatctgatgatacaaatcctagaccggatattgctacccctactgaggtgccagctactcaagcggctggacaaccaagtcaaatagttgcaatgcctgctcaattgcagaatgaagtgtcagaaacgaatccatccgtttctcaaactcaagcagtattgccaaatactggtatacaagaagaccgtactacaggtacagtaggagttctctctcttcttggcgcatttggtttgctatttgccaaaaagaaaaaagacgatgaagaggaagcttaaatagatgatctcatctgatccttggtagctttccctacatgaagtctttgtaaatcaaaaagaactagaaacatcactcatttgtgagaactctagttcttttttcgtatttcaagaagtagtcattcaattgttgataaattgactagttttttgatatataggactaaaagtctgtttaaaaataacgattagtgatgactagatcgcattgaccaaatcttgagcttgtttttcaagtgagtttaggactgtttcttcaagaaccaattttccgtctgcccaagcagagtcattaacacgtgcagcagtgaaatcaccaacgatttgcgtacggataaatggcaagaggtccttgtaaatagcgaaaagttgatcgtgaccggcattagctacagatgatactgtgacaaacttgtcttgaagggcagaagcaccacgtgtatcagataagtcaagggcacgagatagccagtcaagcaagtttttcactgtaccagggatagagaagttgtagactggagagaagatccagatagcatccgcagcgagaactgcttcacgagcagctgctacagctgggtgagttggaacttctaaatcttgactgaagagagggacagctgaataatcaagatagctaacttctgctttaccagcaagtgctttctcagcttcgagcgccatttggtggttgaaagaaccttggcgaagagatccgacgataaataatacttttttagacatgatgtgtctcctttttcttaaatttccgagaagtctctcgttgttacggaatatattacaacaaaacaaaaggacttgcaagaaatttgctcagagtttatttgaaaattataaaattgctgaaacttagtcacgtgctactggaaaagtaagaactgttttttggattctggtttgctttgaagtaagaaatagaattggttgcttatactcaatgaaaatcaaagagcaaactaggaagctagccgcaggttgtactggagtacggcaaggcgaagctgacgtggtttgaatttgattttcgaagagtattcttatattcacttgtaataaagtttaatagatggtaaaatagacgagtgaaaaaaagacaaaacaaagcaaaaaataatctactgtggcagtatggtctagggatgacgattttgcttgtggttatcagtgcttcctttctgtatctagtgtttctgagtatgaaaccttatcaaacagctaaaagtgaaggagaaaaattagctcagcagtatgcaggattagagcaggctgatcaggttgacttatacaatggcttggaatcctattatagcattcttggtcgtaataaaaaacaagaagcacttgctgtcctgattggaaaagatgaccataagatttacgtttatcaactaaatcagggtatttcacaagaaaaagcggaagccgtttctaaggaaaaaggagctggcgagattgacaagattacctttggccgttatcaagacaagccaatttgggaagtcaagtcaggctctgatttttatctagtagattttgaaacaggagcattggtcaataaggagggcctatgaaactatccaaccgtgttttagaaatggaagaaagtgtgaccttggctgctggagcccgtgctaaagcactcaaggctgagggaagagatattttgtctctaaccttgggtgagccagatttcactactccaaaaaatatccaagatgccgccattgcatcgattcaagatgggcgtgcttctttttatacagtgacctcaggtctgccagagctcaaggcagcggtcaatacctactttgagcgcttttatggctattctgtagcgccaaatcaagtgacagtcgctgctggagccaaatattctctctataccttctttatggcagtggtcaatccaggtgatgaagtgatcatcccaaccccatactgggtcagctatggagaccaggtcaagatggcagagggtgtgccagtctttgtccctgctaaagaggacaatcactttaaggtgaccgtagagcagctagaagcagctcgcacagataagaccaaggttttggtgctgaattcgccatccaatccgacaggtatgatttacacccgtgaggagctcttggcaatcgggaactgggctgtagaaaaggatattctcatcctagcagatgatatttatggccgtttggtttataatggccatgagtttacagccatttctagcttatctgaagcgattcgcaagcaaacagtggtcatcaatggtgtgtctaaaacctatgctatgactggttggcggattggctatgccgttggagaagcagacattatcgctgccatgtccaagattgcaggtcaaacaacttcaaacccttcagcagtagcccagtatgcagcagttgaggctctatcaggtgagcaagatactgtagaaagcatgcgtcaggcttttgaggaacgactcaataccatctatcccctacttgctgaggtgcctggatttgaagtggtcaaaccacaaggagccttctacctcttcccaaatgtcaaaaaggccatggagatgaaaggctatacggatgtgacagactttacaaccgctatcctagaagaagctgaagtagccttggtaacaggagctggatttggagcgccagaaaatgtgcgcctcagctatgcgacagacctagatacgcttaaagaagcagttaaacgcttgaaagaatttatggaaaaataaaagaaaaagaaaaggaaaaataatgacaaaacgtgtaacgattattgatgtaaaagactatgttggtcaagaagtgacgattggtgcttgggttgccaataaatcaggaaaaggaaaaatcgccttcttgcaattgcgtgatggaacagccttcttccaaggtgtagcctttaaaccaaactttgtagaaaaatttggtgaagaagtgggacttgagaagtttgatatcatcaaacgcttgagccaagaaacttctgtttatgtgacagggattgtcaaagaagacgaacgttctaaatttggttatgagttggacattacagacatcgaagtgattggtgaatctcaagactacccaattacaccaaaagaacacggaacagacttcttgatggacaaccgtcacttgtggcttcgttctcgtaagcaagtagcggtgatgcaaatccgtaacgctattatctatgcaacttatgagttctttgacaagaacggtttcatgaaatttgatagcccaattctttcaggaaatgcggcagaagattcaacagaactctttgaaacagactacttcggaactccagcctacttgagccaatcaggtcagctttacttggaagcaggagctatggcccttggtcgtgtattcgactttggtccagtattccgtgctgaaaaatcaaaaacacgccgtcacttgactgagttctggatgatggacgcagagtactcatacttgacacacgatgagtcacttgacttgcaagaagcttatgtaaaagctcttctacaaggtgttcttgaccgtgcgcctcaagccttggaaacattggaacgtgatacagagctcttgaaacgctacattgcagagcccttcaaacgtatcacttacgatcaagccattgacctcttgcaagagcatgagaatgatgaagacgctgactacgaacatcttgagcatggagatgactttggttcaccgcatgaaacttggatctcaaaccactttggtgtgccaacatttgtcatgaactatccagcagccatcaaggccttctacatgaaaccagttcctggaaatccagagcgcgtgctttgtgcagacttgcttgctccagaaggttatggagaaatcatcggtggttctatgcgtgaggaagactacgatgcccttgttgctaagatggatgaacttggtatggaccgtacagagtatgaattctaccttgaccttcgtaaatacggtacagttccacacggtggatttggtatcggtattgagcgtatggtaacattcgcagcaggtacaaaacacatccgtgaagccattccattcccacgtatgttgcaccgtatcaaaccgtaaaaataaaataaaaaagttattataataaaaagaaggtaaatcccttctttttttgaactttgggtacaaaaataatgtacaaaaaacgagaatatatagagctttttgattgactaattttaaaaatatatggtagaatcgggttatgaatattgtgttgttgtttcgttaaagaaggtgttctttagcaggaaaggcagggaatatgaagaactccaaccttattctaaatcaacatatatataaaaaaggagaaaaaatgtattcaagaatggagaaataccatggtagaagagctcagcgcttttctattcgtaagtatagctttggtgccgctagtgttctattgggaactgctcttcttttaggagcaaatgctgttaaagctgatgaaacaagtactgcttctacaaaaacttcagaagttacaaattctgataaacagaaacctgattcagccataacaacaccagttgtggaggaacttccagaattaaaaattgatgctgtaaaagcagatgaaaaacctgaagttaaagaagaagctaaacctgtagcagaaaaagaagttaccgataaagctgcaacagaaaaatctgataaagagcaagctgacaaaaaagaagtagctaaagaaaaaactgacaaagaatcacctaaaaaagctgcaacagaaaaagcacaagatgaagtgaagacagttcttacccaattgacttcagaagctgaggttatggcatctgtagcttcaaacttctcagataaagaagtgaaagatgaagctgccaaaaaagaacttgcggttacgattgaggcagttaaactggaagcagcgaagtctaacgatttgctttcatccgatgcttctaaagaccaaatggtagcccaagtgaatcgtctttctgctgccattgaagcagtttatacggaaatgaaacgtgcaggtcatgcaggtaaagtagaatcggtattagctgctactgcgtcaaaaattacaggtaaagacgttcttaaagatggcgaaacagttaatgctgtaacaaacgcttatgttgatatgaatgctgataatacaaaacctgtaggatggggatttgatactactattagcacatcaactcttaaagcaggttctattacaaaaattgaactgactaacttagctgagctaggtggtggtttggcagtaaatacggaaatcagagagacagatggaacagtagttggtaaagttaaatctatcgattataaaacaactacaggaaacaacaataacaaatctacaccatattggggacaacgtactcaacgtggaatgacttatgatcagcgtgttgctgagcaaccagcggtagcgaatgaaactggtacatatacttacaacatcgagtggaacgataaagtaaaagactatcctaatgtgtcgtttggagcgagtaatttatcggggagtggatactatgcaccagaaatttcaaaagatactccgtatacagcaactatcaaaattgatgggcgtacagttcttgaacatacttatacaagaaaaggtcaacaacctaactatcaaaaacaaggtactagtgcatcactaagtgaaaacaatggattgacataccttaacaatgagcaaacaggtagaagtgattcaatcgtattaaaaactgattcagatgttcgttatggggtaggatctaaattcactattaaacttccaaatgcagattttactgagtttaaagaacttgaaggaagttctaactttgtaaatggattaaatacagcgtccactattaaccctaataaaggagatagtattacatatcgtccagctagtcgatgggctaatgttaaagctaacgaaaacaacgtttggattctaaacgatggtcgtgatagtgggttcacactaacacctagattaatctcaccaactgagttagaacttacagttacagaaggtgctattcaagaaggttctgtagtttctatgcctcttcaatctttaggtattgaaaaagtaataaaagacaaaaccttaacaagtgaatattctaaaattacttatgaaaatggattaattaaagaaggttatgtaggaaacgataaaactgcagcaactcttactgtatcaggtggagaatctgttaacggtgaaaaagaagacgttgcaactacagtgccaaatggttggagtgttaaaggtgacggtaaagttcaaggtgagccaccaacaggtgctgttgttagaacatttaaagatttagtgacaggtgaagttataggttttgaaccaacaagatatacggggaatattcctttaagtgaagatggttcaaaagattatactaatgtacttggaaacaaatatgatgtaagtaatgatcccgtagacttagttaaagaagttaatggagaagaatacattcttgcagatatccctgctgaaaatacaaaaggaacactaagtgttacgaagacaagagcaagagatttatattctgaagaagaattaaaagctaaaggtataaatggatctgcatttgttaccccagcagagtatgattatgttaagaaaacaaaagtagaagaagtaaaccgtacaattaaatttgtatatgcggataatgttgcaggcttagcgggtacagaagtattcccatcacaaaaacaaactgtaagctacacaggttcaatcaagttaactgcagaaggtaaagcggtaattaactctaatgacagaccagtttatattaactggaaaggaactgatggacaaagcactgatcttccagaacttgcagtacctcaaaaagaaggttacatcgcaagtgtagaaaaagttccagtacaagcaacaacagctacagatgaagattacgaatatgttgttaaatatacagcaatccaaaaagcgaaaacaatatttgtagacgaaaaaggaaatgcaattccaggagtagctgaaattacagaacaaggtggatcagaaactccattaacaaaagaagctgatgttaaagctaagatcaaagaacttgaaaacaaaggatatgaattagtatctaatacatacccagaaggtggtaagttcgatacggataaagatacagatcaagagttcaaagtaatacttaaacaaaaagaagttacagtaacaccagatcaaccaaaaacaccaggaactccagtagatctaaacaacccagacggacctaaatacccagctggcttggaagaaaaagatctaaacaaaactgttacacgtacaatcacttatgtgtacgaagatggaactccagtattaaatgaagatggaacaccaaaaacagtaacacaagaagctaaattcacacgtgaagcaaaagtaaacttagttacaggagaagttacatacggagattggtcagaagctaaagatttagctgaagttaaatcaccagtagtaacaggtttcttagctgataaagcaagtgttccagtagtaaatgtaactggagattcaaaagatattacggaagtagtaacctacaaaccaatcggatcatggattccaaacatcccaggacaaccaacaaacccaatcaaatatccaaataatccagatgatccaacacaaccaggtaaaccaacagaagtgttaccatatgtaccaggattcacaccgaaggataaagatggaaatccacttaaaccagtagatccagcagatccaacaaaaggatatatcgtaccagatcttccaacagatccaagtcaagacacaccaatcaactacgtaaaagacacgcaaaaagcgaaaacaacattcgtagatgaaaaagggaatccaatcccaggtgttgacgctattactgaagaaggtgactcagatacaccacttacaaaagaagctgacgtaaaagctaaaatcaaagaacttgaaaacaaaggatatgaattagtatctaatacataccctgaaggtggtaagttcgataaagataaagacactgatcaagagttcaaagtaacacttaaagctaaagaagttacagtaacaccagatcaaccaaaaacaccaggaactccagtagatccaaataacccagacggtcctaaatatccagctggacttgaagaaaaagatctaaacaaaacagtaacacgtacaatcacatacgtatacgcagatggaactccagtgttaaatgaagacggaacaccaaaaacagtaactcaagaagctaaattcacacgtgaagctaaagtcaacttggttacaggtgaggttacatacggagactggtcagaagctaaagacttacctgaagtgaaatcaccagtagttaaaggatacttagctgataaagcaacagtaccagctacaaaagtaactgcagattcagaaaatactaaagaagtagtaacctacaaaccaatcggttcatggattccaaacatcccaggtcaaccaacaaacccaatcaagtatccaaatgatccaacagatccaacaaaaccgggtcaaccaacagaaacattaccatacgttccaggattcacaccagaagataaagatggtaatccgttgaaaccagtagatccaaacgatccaactaaaggatatgaagttccaagtatcccaacaaatccaggtgaggatacactaattaactatgtagctaacaaagctaacttggtagttaaatatgtagatgaaaatgggaaagaacttctaccaacagaaactaaagaaggtaaagttggtgatgactactctacaagtggaaaagttattactggctatgtattggaccgtgtagaaggtgaagctaaaggtaagattggaacagatggaacaacagtaacatatgtttacaaaccacttggttcttggattccaaacattccaggtcaaccaacaaacccaatcaagtatccaaatgatccaacagatccaacaaaaccgggtcaaccaacagaaacattaccatacgttccaggattcacaccagaagataaagatggtaatccgttgaaaccagtagatccaaacgatccaactaaaggatatgaagttccaagtatcccaacaaatccaggtgaggatacaccaattaactatgtagccaacaaagctaacttggtagttaaatatgtagatgaaaatgggaaagaacttctaccaacagaaactaaagaaggtaaagttggtgatgactactctacaagtggaaaagttattactggctatgtattggaccgtgtagaaggtgaagctaaaggtaagattggaacagatggaacaacagtaacatatgtttacaaaccacttggttcttggattccaaacattccaggtcaaccaactaccccaatcaagtatccaaatgacccacaagatccaacaaaaccaggacaaccaacagaagtgttaccatacgttccaggattcacaccagaagataaagatggcaacccacttaaaccagttgatccgaaagatccatcaaaaggatatgtagtaccaaacatcccaacaaatccaggtgaggatacaccaattaattacattccaaatgtaactccaaatggtgatcaggacggttatactccacaaccaaaaccgcaacctgaacaagttgtgacttactatgtagacgaaaatggtaaagatatcgcaccaagtgaaaaaggagcacaagctccaaaaggaatttcaggttacgaatacgtaacaactacgaaagaccctaatggaaatcttgtacatcattacaagaaagtggcaacaccacaacctgttccaacaacaccagagactcctgaacaaccagtagctccagtgcaaccggaacaaccaacaactccaacccaacctgctgttccaacaccagctgaaacatcagtaccaactgattcagctactaaaccagcaacacctaaatatgttgatggtcaaaaagaattgcctaacacaggtacagaagctaatgctagcctcgcagcgtttggacttcttggagccctaggtggatttggacttcttgctcgcaagaaaaaagaagactaaaaactcatagtttttgagaagatgattcgtcatcttctttttttactctttgtccactgtagtaggtttaagaaaagcggctccataatatctatagaggatgtacccgcgacaaatagtacatctcagaaatagtatatattcatttttgagatgatagtttgttgtcttctatgttgtattttttatgaaatatatatccaagtatgtttaggaagagtttgataatattatttttttgtacctagggcacaaaaataatataaataaatcgagcataaataagatgtatttattgacgagttaattttatttatgataaactggtatggttgtttttggaaccaaaaatttaatatataaatatatatgtgtttctaagaactgtaaaaatttaagttgagagaaaaaggagaaaacatgtattcgagaatggaaaaatatcatggtagaagagcccagcgtttctctatccgtaaatatagttttggggcagcgagtgtccttttgggaacggcacttgttttaggtgctaatggagtacaagctgatgagactctaccagtaaatccgactacttctgattttgcagctacaaataagaaggatgcagactctgctctaacaacacctgtagttgaagaacttccagaattaaagattgatgctgtaaaagcagatgaaaaacctgaagtaaaagaagaggctaaaactgaagcaacacctgtagcagaaaaagaaattactgataaagctgaaaaagaaaaatctgataaagagcaagctgacaaaaaagaagtagataaagaaaaggctgaaacagtaaaacctaaagatgaagttaaatcagttcttactcaattgacttcagaagcagaagtaatggcaacagttgcttcaaacttctcagataaggaagctaaagatgttgaagctaaacaaaaattatcagctgcaattgctgcagtcaagcttgaagcggtagcggcaaaaggtttgctctattctaacgattctacggaagaacaactaacagcccaagtaaatcgcatctcatctgctattgaagcagtctacgctgaaatgaaacgtgcaggtcatgcaggtaaagtagaagctgtgcttggagctacagctgctaaagatcaaaccattacaggtaaaggtgttattagaaatggtaatgcaattgtaacagttaataatgcctatgtgactatgaacgcagataatactgcacctaaagcatggggaattgatgtagtatttgatacatctcaagcgcaaaatggtgatactactacgattgaaatgaaaaacctaacagggtttggagatagctttaaacctggtacaaaaattactgcagcagatggaactgtaattggtgaagtttcatctaaagaaactactaactctgtaggaagtagaggaggagaaagtccattctggtctcaacgtaagaaagatggtaagacttatgaagagcgtcttaccgaacaaccagctattccgaatgaagtagggactactacttacacgattagatggaatgacaaggcgaaaaactatgctgtaacaactttctatgcagaaaacttaacagccattgattactatgcacctaatatttctaaagatacagaatacacagctgcgattagtgtaaatggtcaacaaattttagaacataagtatactcataaagcatctaagtcagcggcacaaaaacaagatacttctgctactattatgggagataacattttaggatataaaggaagtgaacgcgttagaaagagtgatgcagtagttattaatactgatagtgatgtacgttacggaaaaggttctaaatttacgattacattaccaaatgatgattttacgtattttaaagcaattgatggttcaaaaaacactgtcacaaatactaataaggctgatagtataagttaccgtcctgcaggtcgttggaataatgttcaagctaatgcaaacaacgtttggattcttaatgacggtcgtgatacaaactttacattaaaagctactgtaaaatcaccgacagaattagaaatagaagtaatcgatggagcaatccaagaagattcaacagtttcaataggtttagataaacttggagttgagaaagttataacaaaccgtacattctcagacgagtattctaaattcatttacgatgaagctggtcgtttgaaagatggaagtgttgttggagatactgataaaactgcagctactcttacagtttcaggcgggacaccgcttaatggaggagaggaaaatgtaactaccaaagttgcaaacggttggaaagttgaagttggagctggaggtaatagccagtttgaaacaggtgctgttactattactttagtaaatattgaaacaggtgaagagtttgcatatgaacctacaaattatgatggttatgctaagcctaatgaagatggtagctatgaaactaagaacattttaggtaaaaaatatgatgtttcaaaccaagttcctgatttaactaaaactatcaaaggtgttgagtatattcgtgttgatgttccgtcaaaaggaacaacaggaactgttaatattggtccaaaacgtgctagcgctatctatagttcagaggaacttcaagcgaatggagtaaaccctaatgcttttgtaaataatgttgtttactactatgttaagaaaacaaaagtagaagaagtaaaccgtacgattaagtatgtttacgcagacgatgttaaggatcttgcaggacaagaagtatttgaaccaacaaaacaaactgtaagctatacaggtactatccaagtaaatgataaaaatgaagcgcaggtagatgccaatagaaaacctatctatattaattgggttggaaacggtgatacaaaccttccagaagtaacagtacctcaaaaagaaggttacattgcaagtgtagaaaaagttccggtacagccaacaactgcaacagatgaagattacgaatatgtagtaacttactcaccaatccaaaaagctaaaacaacatttgtctaccaagacaaagatggtaatgttaagcaagtggaaggtaacacgccaatctctgaaacaggtaaaggtggagacaaacttacaaaagcagatgaaatcgctgcgagaatcaaagaagctcaaaacaaaggatatgaagtagtttctaatacatatccaacagatggcgtctttgataaagatgtcgacactgaccaagagttcacagtaacacttaaagaacgtgttgtaccagttacaccagatcaaccaaaaacaccagggacacctgttgatccaaacaatccagacggacctaaatacccagctggcttggaagaaaaagatctaaacaaaacagtaacacgtacaatcacatacgtatacgaagatggcactccagtattaagcgaagatggcactccaaaaacagtagcacaagaagcaaaattcacacgtgaagcaaaagtaaacttagtttcaggtgaagtgacttacggagattggtcagaagcaaaagacttatctgaagttaaatcaccagtagttaagggatttgtagctgacaaagcaagtgttgcagtggtaaatgtaacaggtgattccgaagatattaaggaagtagtaacctacaaaccacttggttcatgggtaccaaacattccaggtcaaccaacagacccaatcaagtatccaaacgatccaacagatccaacaacaccaggaactgataaaccaaaagtaccatacgttgaaggattcacacctaaggataaagatggaaatccacttaaaccagtaaatccaaacgatccaaaagaaggatatgaagtaccaaatcttccaacagatccaagtcaagatacaccaatcaactacgtaaaagatacgcaaaaagcaaaaacaactttcgtagatgaaaaaggaaatccaattccaggtgttgacgctattactgaagaaggtgattcagacacaccacttacaaaagaggctgaagtaaaagctaaaatcaaagaacttgaaaacaaaggatatgaattagtttctaatacatacccagaaggcggtaagttcgataaagataaagacactgatcaagagtttaaagtaacgcttaaagaacgtgttgtaccagttacaccagatcaaccaaaaacaccagggacacctgttgatccaaacaacccagacggacctaaatacccagctggcttggaagaaaaagatctaaataaaactgttacacgtacaatcacatacttatacgaagatggaactccagtattaaatgaagacggcactccaaaagttgttacccaagaggctaaattcactcgtgaagctaaggtcaacttggtaacaggtgaagtgacttatggagattggacaccagctcaagacttggctgaagtgaaatcgccagtagtaccaggatacttagctgataaagcaagtgtaccagttgtaaatgtaactgcggattcaaaagatactacagaggtagtaacctacaaaccacttggttcatgggtaccaaatatcccaggtcaaccaacaaacccaatcaagtatccaaatgatccaacagatccaacaacaccaggcaacgacaaaccagttcttccatacgtaccaggtatgactcctaaggacaaagatggtaatccgttgaaaccagtagatccaaacgatccaactaaaggttatgaagtaccaaatgttccaactaacccaggtgaggatacaccaatcaactacgtgaaggatacgcaaaaagcgaaaacaactttcgtagatgagaaaggaaatccaattccaggtgttgatgctattactgaagaaggtgactcagatacaccacttacaaaagaagctgacgtaaaagcgaaaatcaaagaacttgaaaacaaaggatatgaattagtatctaatacatacccagaaggtggtaagttcgataaagataaagatactgatcaagagttcaaagtaacacttaaagaacgtgttgtaccagttaccccagatcaaccaaaaacaccaggagcacctgttgatccaaacaacccagacggacctaaatacccagctggcttggaagaaaaagatctaaacaaaacagtcatacgtacaatcacatatgtgtacgaggatggaactccagtgttaaatgaagacggaactccaaaagttgttactcaagaggctaagttcactcgtgaagctaaggttaatttggtaacaggtgaagtgacttatggagattggacaccagctcaagacttggctgaagtgaaatcaccagtagttaaaggatacttagctgataaagtaacagtaccaactacaaaagtaactgcggattcaaaagatactaaagaagtagtaacctacaaaccacttggttcatggattccaaacattccaggacaaccaactaacccaatcaagtatccaaatgatccagcagatccaacaaaaccaggaagtgataaaccagttcttccatacgtaccaggtcacacacctgttgatggaaacggacaaccacttaaaccagtagatccaaaagatccatcaaaaggatacgaagtaccaaatgttccaactaatccaggtgaagatacaccaatcaactacgtagcgaacaaagcgaacctagtagttaaatatgtagatgaaaaaggcaaagaccttctaccttcagaaactacagaaggtaaagtaggtgatgagtacgctacaagtggaaaagttattactggatacgtattggaacgtgtagatggagaagcgaaaggtaagattggagaaaacggtacaacagtaacttatgtttacaaaccacttggttcatggattccaaacatcccaggacaaccaacaaatccaatcaagtatccaaatgatccaacggatccaacaaaaccaggccaaccaacagaagtagtaccatacgtcccaggctacacacctaaggataaagatggtaatccgttgaaaccagtggatccaaacgatccaactaaaggatatgaagtaccaagtgtcccaactaacccaggtgaggatacaccaattaactacgtagcgaacaaagctaacctagtagttaaatatgtagatgaaaacggtaaagagcttctaccttcagaaactacagaaggtaaagtaggtgatgagtacgctacaagtggaaaagttattactggatacgtattggaacgtgtagaaggtgaagctaaaggtaagattggagaaaacggtacaacagtaacttatgtttacaaaccacttggttcatggattccaaacattccaggtcaaccaactaacccaatcaagtatccaaatgatccaacggatccaacaaaaccaggaagtgataaaccagttcttccatacgtaccaggtcacacacctgttgatggaaacggacaaccacttaaaccagtagatccaaacgatccaacaaaaggatacgaagtaccaaatgttccaactaacccaagtgaggatacaccaattaattatattccaaacagtcctaagccaaacccaactccttacccaggaccaactccagctccaactcctaaaccagagcctaagccggaaccagcaccagttccaacaacaccagagactcctgaacgaccagtagctccagtgcaaccggaacaaccaacaactccaacccaacctgctgttccaacaccagctgaaacatcagtaccaactgattcagctactcaaccagcaacacctaaatatgttgaaggtcaaaaagaattgcctaacacaggtacagaagctaacgctagtcttgcagcgcttggacttcttggagccctaggtggatttggacttcttgctcgcaagaaaaaagaagactaaaaactcatagtttttgagaagatgattcgtcatcttctttttttatttcggtgtttttacttgcgtaaaaaatttttttctagtataatagtttattgtgagcgaacctcacttaccccttgcaaagtcttggggtcattagaccaaaaggaggaacatatcaatggctaaatacgaaattctttatattattcgtccaaacattgaagaagaagctaaaaacgctttggtagcacgttttgactctattttgactgacaacggtgcaactgttgttgaatcaaaatcttgggaaaaacgtcgtcttgcatacgaaatcaaagatttccgtgaaggactttaccacatcgttaacgttgaagcaaacgacgatgcagctcttaaagagtttgaccgtctttcaaaaatcaacgctgacattcttcgtcacatgatcgtcaaaactgacgcttaagaaggtaaactatgattaacaatgttgtacttgtagggcgtatgacacgtgacgctgagttgcgttataccccatcaaatgtagcagttgcgacttttactcttgcagtaaaccgtacatttaagagtcaaaatggcgaacgtgaggctgattttatcaatgtcgttatgtggcgccaacaggctgaaaaccttgctaattgggctaaaaaaggctcacttatcggggtgacaggtcgtatccagactcgtagttacgataaccagcaaggacaacgtgtctacgtgacagaggtcgtggctgagaatttccaaatgttggaaagccgtagtgtgcgtgaaggtcacacaggtggagcttattctgcaccaagttcaaactattcagcgcctacaaattcagtaccagacttttcacgtgatgaaaatccatttggagcaacaaatccattggatatttcagatgatgatttaccattctaatggacaactaaaattataaaggagaaaaaacatggctcaacaacgtcgtggcggattcaaacgccgtaaaaaagttgattacatcgcagcaaacaaaattgaatatgttgattacaaagatactgagcttcttagccgtttcgtttcagaacgtgggaaaatccttcctcgtcgtgtaacaggaacttcagctaaaaaccaacgtaaagtaacaacagctatcaaacgcgctcgcgtaatggctttgatgcctttcgtaaacgaagattaaagaaaagacccggttgggtctttttttcacgagccttgaaatgagagagcgagtttgggttcgggtggacctctttttcagacccggttgagtctttttttcacgagatagtttttttctgactttggcgtgctataatggtaatagaaagagtaaaggtgggtaagtcaaagatgaattgtacgattagaaatatgattaagtctgatattgaatccttatctcatggatttatgaatcaaggttggcctggtagagaggaaattttggctagatattttctggaacaggaaagtggggagagagaagttttagttgcagagattgatggtgctgtagcgggctacattaccattttgccctctgctaaacacgggccttttgcgtcaatctatccagagctttcagatttcaatgtgtttgaaccatttagaaataaaggcataggcaataggctcttagaaaaagcggaacaaggagttaagcgtttttctggtaaagtatgtctaggtgtaggtttgcacttggggtatggtcctgcccagagattgtatatcaaacgaggctatattccagatgggacaggtgtctggtatagaaataaaccgctagaaatgggtgcaagttgtcaaaacgatgatgatttagttttatacttatccaaggacttacaataaaacgggaaactttttgaaaataggggatttagctactttatggtataatggaaagagttagattgaaagaggtagtgagatggatgccaaattaagatacaaggcaaagaaaatcaagattgtcttttttgatattgatgatacattgcggaattcaaagacaggttttattccagcttcaatcccaactgtttttaagcaattacgtgagaaaggaattttgacaggtattgcttctggacgagggatttttggtgtcgtaccagagattcgtgagctaaagcctgacttttttgtaaccttaaatggtgcctatattgaagataaaaaaggtcaggtcatttaccagcatcagatcgagaagtcagatgttgaggagtatatctcttgggctaaggaagaaggaattgagtatggcttggttgggagtcatgacgccaaattatcgactcgcaccgatatgattagtgaggctatcaatccaatttaccccgatttggatgtggatcctgatttccatgagaaagaagacatctatcagatgtggacttttgaagacaaaggagatgacttacacttacctgacagtctctctgacaaacttcgcatggttcgttggcatgagcattcgtctgatattgtgccgatttcaggctccaaagcgacgggtgtggaaaaggttgtggaacaccttggcttgaaaccagagaacgtcatggtttttggagatggcctgaatgacttggaactctttgattatgctggaatcagcgttgcaatgggaatttctcatgataacatcaaagaaaaagcagattatattacaaaaacattagaagaagatggcatttttgatgccttagaaggatttggtatggtagaaaaagaattgcatttcccacaagtagatattgaaacagtagaaggtcctatcgcgactattaagactaatcacggagacttgcgtattaagctcttccctgaacatgctcctaaaacagtagctaactttgttgcactttcaaaagatggctactatgatggtgtcattttccaccgtattatcwaggactttatgattcaaggtggagatccaactggaactggtatgggtggcgagtcaatctacggcgaatcatttgaggatgaattctcagaagaactttacaatatccgtggtgctctttccatggccaatgctggtccaaataccaacggcagccagttctttatcgtgcaaaatcaacacctgccttattctaaaaaagaaattgctcgtggtggttggccagaaccgattgcggaaatctatgccaaccaaggtggawyccctcacctagaccgccgtcacactgtatttggtcagctagctgatgaagcttcttacgctgtcttggatgccattgctgctgttgagacaggagctatggataagccagttgaagatgttgtgattgaaacaattgaaatcgaggactaagatgaaaatcggtgataagctaaagggccgtattacagggattcagccctacggagcctttgttgagctagagacgggtgatacggggctgattcacatttcagagattaggacaggctttattgaaaatatccaagaagccttgaaagtcgatgaagaggttcaagttcaagtagtggatttagatgaatttacagggaaagctagtctttctatccgcactttggaggaagaaaagcaccagtttccgagacggcgacgcttttcaagcgaccgttttaac

SEQ ID NO: 59 - DNA, 100480 bp, Streptococcus mitis NCTC 12261 contig5
tattaaaatcatgtagagcgcattaaccagctcttttcgacagatattaaaatcattcaaaatagagaggtttttagctattcggtggatagtgttctcttgtcacgttttccacgttttcctaaaaagggcttgatagtggatttctgtgctgggaatggagcagtggggctttttgctagcactcggactcaggcacagattttggctgttgagattcaggagcgtttggcggatatggctgaacgctctgtccgtttgaatggtttggaagagcagatggaggtcatctgtgatgatttgaaaaatatgcctgcttacatccagggaagtaaggtggatatgattttgtgtaatccgccctatttcaaggtggatcctcattctaatctgaacgagagtgaacattatctcttggcgcgccatgaaattacgactaatttgcaggaaatctgtcgtagtgcccagagtattctcaagtctaatgggcgtttggccatggttcatcgtcctgatcgacttctggatattttggatacattacaacggcataatctagctcctaagcgcctgcagtttgtttatccaaaaagagaaaaggaagccaatatgcttttgattgaggcaatcaaggatggttcaacaagcggctttaaggtcttaccacctctcattgttcacaatgatgatggctcttatacgcctgaacttgaagagatttattatggatcataaggcttatatgtacgtgctggagtgccgtgatggatcttactatacaggctatacgactgatgtgagaagacgccttgctgtccacaatagtgggaagggagccaaatacacacgagcacgcttgccagtcaaacttatctatgttcaaggttttgccagtaaggaagaagccatgtcagcagaagcccttctcaagcgtaagaagaggccacagaaggaaagatttttatctgaaaatcaagatagaaatttactcatactcaatgaaaatcaaagatcaaactaggaagctagccgtagtcagtacttgagtacggcaaggcgaagctgacgtggtttgaagagattttcgaagagtatcagttattttgaagaattgtgaggagccctttgactcctcttacttttgtcaaaaagcgaaaaaaatgctacaataaagagaataaataaaatgaggtattatcatgtctaagattctagtatttggtcaccaaaatccagactcagatgccatcgggtcatctgtagcctttgcctaccttgcaaaagaagcatacggtttggatacggaagctgttgctcttggaactccaaatgaagaaacagcctttgtcttgaactattttggtgtagaagcaccgcgtgttatcacttctgccaaagcagaaggagcagagcaagttatcctgactgaccacaatgaattccaacaatctgtatcagatatcgctgaagtagaagtttacggtgttgtagaccaccaccgtgtggctaactttgaaactgcaagcccactttacatgcgtttggagccagttggttcagcgtcttcaatcgtttaccgtatgttcaaagaacatggtgtagccgtgcctaaagagattgctggtttgatgctttcaggtttgatttcagatactcttcttttgaaatcaccaacaacacacccaacagataaggttattgctcctgaattggctgaattggctggtgtcaacttggaagagtatggtttggctatgttgaaagctggtacaaacttggctagcaaatctgctgacgaattgattgacatcgatgctaaaacttttgaattgaacggaaataatgtccgtgttgctcaagtaaacacagttgacatcgctgaagtattggaacgccaagcagaaattgaagctgcaatgcaagccgctaacgcagcaaatggttattctgactttgtcttgatgattacagatatcgtcaactcaaactcagaaatcctagcacttggtgctaacatggacaaggttgaagcagccttcaacttcaaacttgaaaacaatcatgccttccttgctggtgctgtttcacgtaagaaacaagtggtacctcaattgactgaaagctttaatgcttaagattttgagtgttaattcaaattaggaaaggctagtttgacttatatcgaaaggagtttcggctcctttttttctaggagtgaagcatgttagaaaatggcgatttgatttttgtgagagatgagtcagatatgggacaggccattcagacttccacaggcaactataaccatgttgcgatttgtttggatgggatgatttaccacgctagtggacaggatggtgttgtctgtcaggaaccagtagacttctttgagtccaatcacttgtacgacctctatttctacccagaaatggatatccagtctgtgaaggaaaaagcttgcaaacatctaggaacaccctacaatgcttctttctatccagctggacctggtttctactgttcccagtacatggcagaaatcctaccgatttttgaaacgattcccatgaaatttggagatggggagcaggagattagtgatttttggagagagtattacagagaactaggtctgcctgttcctttgaaccaagctgggaccaatcctagtcagttggcagcatcgcctctgttagaatgtaaagaaaggaatcttcatgattcagatttttaatccatctcgtttgacgagacagccattttttagagaattgatccgctatctggaccagcatgaggatgtgattttgcgagaaattaaggctcaatttccagatgttgcagttgataaactcatggaagagtatataaaggcaggtttgattctacgagaaaataagcgttattaccttaatcttcctatgcttgaatcactcgatagtctcgaactggatcaagagatttttgtcagcgaagatagtccagtctatcaagccttgttagagcagagttttgagacagaattacgaaatcaaaccaatgcagctattttagttgaaaagacggactttgcgagaacagaaatgaccttgtccaattatttctacaaggtcaaacatcagtatcctttgacagaaaaacagcaggagctttacgacattttgggagatgttaatcctgagtatgctctcaaatatatgacgacttttttgttgaaatttctcaaaaaagaccagcttatacagaaacgccgtgatatctttgtggatagtttggtcgtcctagactatattgtccaaaatgaagaggggaagtatgagttgaccgtcgattttgacaaggagagattaactttctacttagcgtgaaattttgtttctgagcacattgtttgactttccttaggattaagtataaactatatgtaaccggtaacacatatcggaataaactaaaggagacaatcatatgtcacttgaaaacaaattggaacaagcaacaggcgctatcaaagaaggatttggtaaagttactggggatagcaagactgaagcagaaggcgctgtagaaaagacagttgctaaggcaaaagaggtagttgaagatgctaaaggtgctgtagaaggtgccgttgaaggtttgaaaaacgcttttaaataaaaatagaaaaaatcaagggtttcatttcccttgattttttactatcttataaataattttctgcgacggctgcatctcctggataggcttctttcttgccttgaacgatttggtagcaatcggctcccttaccggcgataataactgcatctaattcgtgatttgtgatagccatagctgccttgatggcttcttggcgatccgcaattttttcaacaggatgattgatgtaactcctaatttcatctgcaatggccattgggtcttcatagttagggtcatcagcagtcaaaaagacttgaatctcagggtgttgattgaggagaagtccaaagtccttacgacgactttctcccttatttcctgtcgaacctaacaccagagcaatctttcctgtttgatgagtctctacaacattgatgagttttttgagactgtcaccattgtgggcgtagtcgatgaaaaccttggctccgtttttctgagtgaggacttccatacgaccaggaacacgggttgcagcgattccttttttgatgtcctcaagactagctccgagacggaggcaagcaagtccagcagcaacggcattttcttggttaaagtggccaatgagttgaatatcataatctccagcgagtttacccgtagctgaaaagctaaaggctttggaattctcgatttggttatcagactggctgccgtagaaatcatggtcttgatcttctacttgttctttcaagacagaaaagtgatccatgtcactattaatgatgactgctcggctattttccatcaagagacgtttgtggtagaagtagtcttcaaagctagggtgttcaatcgggccgatatggtcggggctgatattgaggaaaactcccacatcaaaggttagaccatagacacgtttgaccagataggcctgactggagacctccatgatgaggtgagtacggtcattttgcacagcttgattcatcatgtcaaagaggtcaatactctcaggggttgtcaatgcagacttaaagaaagtcttgccatctagagttgtattcatggtcgagagcatagcaggtcgatgcccttgagataaaatgttataggcgaagtaggctgctgttgttttacccttagtaccagtaaaggcaaggagtttgagttttttctgtggattgccataaaattccatagctaccaaactcatggctttcttgatatcactgacgataatagcaggaataccaacctcataatctttttcagccacataccaaccgaggccttgagagatggcagaaatcaggaattccttcttaaaggcagcacccttgacgaaaaagaggctcttctctttggccttgcggctatcatagcagatggtgtcaaatatgacatggctgtagttgtagtgataatgtccttggtcgataatctcacggaagagatcatctttctttaaaatatctaatacggtttcaatcttaatcatactttctattgtaaaccgaaagtcgtaaatttacaagtaacaaggaaaagtttataatggaagatgaggaatttttcctagttattaaaattaaatgaggaatctatgtctaacgaaaacaatcaccagcaggcccagatgttacgagggactgcttggctaacggctagtaactttatcagtcgtctactcggggctatttatattatcccttggtatatctggatggggtcttatgcggctacagcaaatggtctcttcaccatgggctataatatctatgcctggttcttgctggtttcaacagcgggtatcccagttgcagtggctaagcaagtggccaagtataataccatgcgagaagaagagcatagctttgccctgattcggagctttttaggctttatgacaggattaggtctggtttttgctttagtcttgtatgtctttgctccttggctagcagatttgtcaggtgtagggaaagacctgatcccaatcatgcagagcttggcttgggcggtcttgattttcccatctatgagtgtgattcgaggcttcttccaagggatgaataacctgaaaccttatgccatgagccaaatcgctgagcaggtcattcgtgttatctggatgctcttagctacctttatgattatgaaaatgggttcaggggattatctagcagcggttacccaatccacctttgctgcttttgtcggcatggtagctagttttgcagttttgatctatttccttgccaaagaaggattacttaaaagagtccttgaaacaggagataagataaacagcaagcgtcttttggtcgacaccattaaggaagccattccttttatcctgacagggtctgctatccagcttttccagattttggaccagatgacctttatcaatagtatgagttggtttaccaactatagtaatgaagacttggttgtcatgttttcttatttctctgccaatcctaataaaatcactatgattttgatttctgttggggtttcgattgggagtgtaggtttgccacttttgactgaaaactatgttaagggggacttgaaggcggcttctcgtctagttcaggacagcatcaccatgcttttcttattcctactgccagcaactgttggagtggtcatggtaagagaatctctttatacagtcttctatggtaagccagatagtttagctatgggcttgtttgtctttgccgttttgcagtctaccattttaggtttgtacatggtcttgtctccaatgcttcaggccatgttccgcaaccgtaaggccgttctctactttatctatggttcgattgtcaagctagtcttgcaaatacctaccattgctctctttcacagttatggtcctttgatttccacaactatcggtcttatcattcctaacgtcttgatgtatcgggatatttgtaaggtaacgggtgtcaagcgcaagattattgtgaagcgaactattttaatcagtttgttgacttttgttatgttcatcagtgtaggcgctatccagtgggtactgggatttgtcttccaaccaagtggacgtttgtggagttttctatatgtagcccttgttgggtgccatgggtgggggtgtttatggagttatgagtctccgtacccgtctattggacaaggtgattggaaaagctcaagcagatcgcttacgaatcaaattaaagttaacttaaaaaaacatttataaataaaagggataatttgaacatttctatcatgaaatgcttgaattattctctttttattattttgtagaataatttctatagtttgtggatagtaatttaatttttcttaaattttacttaaaaagctattgactaaataaaactcaagttgtataataagacaaatatttaaatcaggaggttctggagatgaaaaagtctaaagccaagtatgcagcacttgcaggtgtcgtgttaagtgcaggtattttattaagcgcgtgtggaagttctagcacagggtcaaaaacatataactatgtttataccagtgatccgtctagtttgaattatctagcagaaaaccgtgcaacaaccaatgatattgtgactaatctagtagatggtctcatggaaaatgaccagtatggaaactatattccatctttggcagaggattggagtgtttctaaggacggtttgacctatacctacaaactgcgtaaagatgctaaatggtatactgcagatggagaagaatatgctcctgtaactgcccaagattttgtaactggtttgaaatatgcagcagataaaaaatcagaagccttgtacttagttcaagaatccgttgcaggtttggatgattacattaacggtaaaacaagcgacttttcaactgtcggagtcaaggcacttgatgaccaaactgttcaatataccttgacacgaccagaatcttactggaactcaaaaacaacttcaaccattctcttcccagtcaatgcggatttcttgaaatcaaaaggggatgattttgggaaggtagacccatctagtattttgtacaatggacctttcttgatgaaatcctttgtttcaaaatctgttattgaatttaagaaaaatccgaactactgggatgctaaaaatgtctttgtagatgatgtgaaattggcttattatgatggtagtgaccaagatgcactagctcgtaactttgttgagggagcttatagttatgctcgcctttatccaaatagtgcaagctttgaaggtattaaagaaaagaataaggacaatatcatctatagcttgcaagatgccacttcttatttcttaaactttaatctagatagaaaatcttataagttcacttccaagacaagtgatgctgaaaagaaatcgactcaggaagcggttctcaataaaaacttccgtcaagccattaactttgcctatgatcgtacagcttacggggctcaatctcagggagaagatggtgcaactaagattttgcgtaacttggttgttcctccaaacttcgtaagtatcaacgggaaagactttggtgaagtagtagcctctaagatggtgaattatggtaaggaatggcaaggaatcaactttgcggatgcccaagattcatactacaatgctgaaaaagccaaggctaaatttgcagaggctaagaaagaactccaagctaaaggagtccaattccctattcacttggacatgacagttgaccaagctgctaaacagggtgttcaagaggcaaattctatgaagcaatctattgaagcagctttaggtgcagaaaatgttgtaattgatattcaacaacttactactgaagactatgataatacaagctatttggctcagacagcagctcagaaggattatgatctatacaacggtggttggggtcctgattaccaagatccttcaacctatcttgatgtcttcaatcttaattctggtggtttgttgcaaaatctaggtttagagccaggtgaagccaatgacaaagccaaggctgttggattggatgtctacactcaaatgttagaagaagccaataaggaacaagatcttgcaaaacgctatgaaaagtatgctgatatccaagcgtggttagtagatagcgctttagcgattccaaatgtttctaagggtggaacaccaacattgagaaaagttgttcctttctcaacaccatattcattagctggtaataaaggtatcgaatcatataaatatctcaaagtacaagataaaacagtcacaaaagatgaatatgaaaaagccaaagaaaaatggctgaaagaaaaagaagaatccaataaaaaagcccaagaagaattggcaaaacatgtcaaataaggatttttcaagaaaaacgatggtttcaaaagaaactgtcgttttttatagaatgatggcgaagttggaagaaaagtgcttacattttttaaattgtttatcaaatttatgatataatgaatataataaaagttgtgagaagctatttttttaaatcctcttccagtgttaactgaagtatacacatgctaggatgattttataggaggggatgccgtctactgtaaaagtaagataaaactcaataattgataagttcttctttaaatgaagaattcttaactggctatttactaatagggaggtatcatcatgggcgctattatggagtttgcaacagaaaaacagattgcatcatttctctcaacttgtcacattgaaggacaaaagaattttctgatggctttcaagaaaaagacatggttgaaatcctttattgattttttcattataggtggttcctactatgttcagtcgagtgtgaagcctaagattctagcattcacatctaagggaatctacttgatggacatcagtgatgtgactgagaaacgttctaatcacgtcgtagagatgccttggaatcaagttcaagattttacttataagacagccttgaatacagttaggctgaattggaattatcaaaatgaagactatattttttccgtggatgtcggtcagattggtcagcatgtgggccaatatcaatttaataaagaccattatgactatttagcccaacaggatttctttcagtcaaagtaaactctagcaatcattttcacaaaagaatctggaagcttttctggattctttttagctttactcgataagtctatagtttgaaactataactagctcttgaaaagaagaaaatgagttgatgaaaataagtggtacaatagttactatagatttggaggtattgtatgagcaaggaattacacattaacacaattttggcccaggcgggcattaagtcagataaagcgacaggagctttggtgacaccgcttcatttttcaacgacctatcagcatccagagtttggtcaatctactggatttgactatacgcgcaccaaaaacccaactcgcagtaaggctgaagaagtcttggcggctattgagtcagcagactatgccctagcgactagctcagggatgtcagctattgtactggcctttagcgtttttccagtaggaagtaaggtcttggctgtccgtgacctttatggtggttctttccgctggttcaatcaagtggagcaggaaggtcgtttccattttacctatgccaatacagaagaagagttgattgccgagttagaaaaggacgtagatgttctctatatcgaaaccccaaccaatcccttgatgttggagtttgatatcgaaaaactagcaaaattagctcatgctaagggtgccaaagtggtggtggacaatactttctacagccctatctaccaacgtccgattgaagatggagcagatatcgttcttcattcagcaaccaagtatctagcaggccacaatgatgtcttggctggagttgttgtgaccaatagtgtagaattatacgaaaagcttttctacaatctcaatacgacaggggcagtcttgtctccatttgacagttatcaattgattcgtggtctcaagtccttgtctcttcgtatggagcgctcaacagctaacgcccaagaagtggttgcctttttgaaggattctccagcagttaaggaagttctctacactggtcgtgggggtatgatttcctttaaagtagcagatgaaacacgcattcctcacattttgaacagtcttaaggtcttctcttttgcggaaagtttgggtggggtagaaagtctcattacttatccaacgacgcaaactcatgctgatattccagcagaagtgcgccactcttatggtttgacagatgacctcttgcgtttgtcgattgggattgaggatgctagagatttgattgcagatttgcaccaagccttggaaggataagaaaaagatgggaaaatatgattttacaagcctgcccaatcgtttagggcaccatacctataaatggaaagaagcagaaacggatagtgaagtcctaccagcttggatagcggatatggactttgtagtcttgcctgaaatccgccaagccgtgcagacttacgctgatcaactggtttatggctatacctatgccagtgaagagttaattaaggaagttcaaaagtgggaagccacacaacacggttaccactttgacaaagaggctcttgtctttatcgagggtgtggtaccagccatctcaacagctattcaagcctttacaaaagaaggcgaggcggttttgattaacacacctgtctatccaccctttgcacgcagtgtcaagttgaacaaccgcagattgattaccaattctttggtggaaaaagatggtctgtttgagattgactttgatcaattggagaaggatttggtggaagaggatgtcaaactctatattctttgcaatcctcacaatcctggtggacgtgtttgggaaaaggaagtgttggaaaagattggccaactctgccaaaaacacggtgttttcttggtttcggatgagattcaccaagatttggccctctttggtcacaagcatcattccttcaataccattaatcctgccttcaaagattttgcgattgtcttgagcagtgccactaaaacctttaacattgctgggacaaaaaattcctatgcagttattgaaaatcctaagttgagactggcttaccagaaacgccagttggctaataatcaacatgaaatttcaggtttgggttatttggcgacagaagctgcctatcgctatggtaaggattggttagaggaactcaagcaagtctttgaagaccacatcaattatgtggtagatctatttggaaaagagactaaaatcaaggttatgaaaccgcaaggaacctacttgatttggcttgatttttcagcctatgacctgactgatgaaacattacaagagcttttgagaaatgaagctaaggttatccttaaccgtggtttggattttggagaggaaggaagtctccatgctcgcctcaatgtagccatgcctaaatctctgttgcaagaagtgtgtcagcgaattgtgacgacttttgctaaactttaaaaatccagccttctaggagaaaagtatccttagaaggctattttcataggggaaaatatggtataataaaaagataaggtaaaggtaaaaatatggctaaattgattccggggaaagtccgtatcgaaggcgttgccctttatgaaactggtaaggttgacattatcaaggaaaagaacaatcggctctacgctcgcattgcagaagaagaactgcgctatagtttagaggacgatttggttttttgtgcctgcgattttttccaaaagaggggctactgtgtgcatttggcagcgttggagcattttctaaaaaatgatgagcgtggtcaggaaatcttgcagagtttggaagaaggccatgaggaaaaagaggccgttgaaaccaaggtgaccttaggtggaaaatttttggaccgaatcttgtctccaaaatcagaccgagcctatgagttgtcggctgtgggtcaggtggaagcaggaagcaatcatatcttgtggacgcttagaatcgggcaaatcaatagccaaaaatactacgttattcgggatattccactctttttaaaagttgtcgagaagagaaagccttatatgattggcaagacctatgaggaatccttgtcttgggaatcctttgatgaggccagccaagaacttttgactttcttgcggggactagtggaggaaggacaggctccagagctctttttccaaaaccaaggtcggcatctctttttccctctgacttttttttgagcagggtgtgaatttactgatggccttgccccattttcaatttgaccatcaagtggatagctaccaaaccctgctttttcaggatttgcatgcggatgccaatctatttacctttacagtaacagaatactcggactattttgaaatggaaatcagtgagagtccgagggtcaatgccttttatcaaggagctgtgcttttccataaaggacaggtttattttctaacagaccagcagatgcgccttctcaaggaaatcaaagcgctgcctttggatcaacaaggaaagaaatatctgcaatttgatagcagtgatcgagataagttggcttcttgtctaacgctctttggtcagatgggcaccgtttcagctccagaacgtctacatatcaaaacttttacaccctctttttactttgacagggaagaagacaatcggattcgtttagaaattcagtttgattatggagacaggaaggtatctagcagacaagagctagaagaattacctttttcgagtgatgctgacttagaagaaagagtttttcaagtctgtttggcagctggatttgaagcggattttcaatcttggcgtcaggctttaaaagcagagtctgtttatcatttcttccatgaaatcattccagtttttgaaaaactcggaaatgttgatctatcagacaagctagaagaaatttatagcctagcaagccctcaagtgcagattgcttccaagggaggtctcttggaaatccagtttgattttcaagatatcgcccaagaggaaattgaccaagccatgaaggccttggttgataatcgagatttttatattgattcgtctaatcaagtctacttttttgatgaagagaccaagaaaattcgccaaaatctacaggaactggggcagtttgaattaaaagatgggaccttgaaggctcgaaaatccttggcttatagtttagctcatctctttgaaggacgtgaccgtgtttctttttcacaagaattccagaatttggcccaggatttgacgcatccagaggacttccctagacaagcaactcaagtcaaggctgccttgcgagattatcaggaaaaggggatcggctggctacaaatgctccatcattatggttttggtgggattttagctgatgatatgggacttggtaaaaccctgcagaccattgcttttttgaccagtcaagtgacaaaagaaagtcgggtcttgattttagctccatcaggtttgatttacaactgggcagatgaatttcagaaatttgctccacagttggatgtggctgttgttcatggtttaaaggctagtcgtgaagagattcttgctgaaagccatcaaatctatgtgactagctatgctaccttccgtcaggacagtgagctttatcaggggatggcctttgacttccttttcttagatgaagctcaggtcatgaaaaacgcccagactaagattgcccagaccttgagacaatttgtggtgccatcagtttttgccttgtcaggaactccgattgaaaaccatctgggtgaactgtggtctattttccaaatcgtcatgccaggacttttgccaagcaagaaagaatttatgaaattgccagctgagcgcgttgctcagtttatcaaacctttcgtgatgcgacgtaagaaagaagaagttctgactgaattaccagacttaatcgaagtggtttataaaaatgaactggaagaccagcaaaaggctatttacctagcccagttgcaacagatgcgagaccgtctggctcaagtgtcagatcaggaatttcagcgaagtcgtgtggaaatcttgtctggtctgatgcgcttgcgtcaaatctgtgacactcctgccctctttatggaagattatcagggagccagtggcaaactggatagtcttcgagacctgctactacaggtggcagacggcggacaccgtgtcttgattttctcgcagttcaagggaatgttggagaaaattgaacaagaattgccagacttgggcttgacttcctttaaaattaccggttcgaccccagccaaggaaagacaagatatgaccaaagcctttaaccaaggggaaagagatgcctttctgatttccctcaaggctggtggtgtcggtctgaatctgacaggtgctgatacggttattttggttgacctttggtggaatcctgcggtggaagcgcaagctattggccgtgcccatcggataggtcaggaagaaacggttgaggtttatcgcttagtgaccaggggaaccattgaagaaaaaattcaggaactccaagaacaaaagaaacatctagtgtcacaagtattggatggaacagagtcacgtggcagtctcagcctagcagaaattagagaaattttgggaatttctgaagccagcacttgaaaaatcaagacaatacgctataatgaagtgttgaaaggaaatagaaaatgagagaagaacgatttccattggtgtcagatgatgagatcatgttgactgagatgccggttatggacctctatgatgaatctgactttatcagtaatatcaagggagaataccgtgataagaattatctggagtgggcccctattactgaagaaaaaccagtaaaacagattgaaaagctagtagagaaacctaagaaggctggtttaggagttaaaaaagaaggaaaaagctatgcggaggtggcgcgtgaagaagcgcgtgcggacttgaaaaagaaacgctcagcaagttatctgactaaggatattactcctacaaggcgcccttctcagcaacgtttggatagacagggcaatcaacctaccgcgcctttccaaaaggaaaatcctggcgaatttgtcaaatacagtcaaaaattgactcagtctcattacatcttggcggaagaagtgaacaatatgtcgactcaagctgagccaaaagaaacttcaggcccaaagaaaaacaattatgattttctgaagaagagccaaatctacaataaaaagaatcaacaaaaagaacaagaacgtcaggttgcccaagagttgaatctgacaagaattacggaataggggagaaaacatgtcaaagacatatcattttatcggaattaagggatcaggtatgagtgccttggccttgatgttgcaccaaatggggcataaggtacagggttcagatgttgaaaagtactactttactcaacgtggtcttgagcaggcaggaattaccattcttccttttgatgaaaagaatctagacggtgatatggaaattatcgctggaaatgcctttcgtccagataacaacgtcgaaattgcctatgcggaccaaaatggcattagctacaaacgttaccatgagttcctaggtagctttatgcgcgactttgttagcatgggagttgctggagcgcacggaaaaacttcaacgacaggtatgttgtctcatgtcttgtctcatatcacagatactagcttcttgattggagacgggacaggtcgtggatcagctaatgccaaatattttgtctttgaatctgacgaatatgagcgccacttcatgccttaccacccagaatactctattatcaccaacattgactttgaccatccagactatttcacaagtctagaagatgttttcaatgcctttaacgactatgctaaacaaattaccaaaggtttgtttatctacggagaagatgctgaattgcgtaagattacgtctgatgctccgatttattattatggttttgaagcagaaggtaatgactttgtagctagtgaacttcttcgttcaacaactggttcaaccttcaccgttcatttccgtggacaagagttggggcaattccatattccaacctttggtcgtcacaatatcatgaatgcgacagccgttattggtcttctttacacagcaggatttgatttgaacttgttacgtgaacacttgaaaacatttgccggtgttaagcgtcgtttcactgagaaaattgtcaatgacacggtgattatcgatgattttgcccaccatccaacagaaatcattgcaaccttggatgcggctcgtcagaaatacccaagtaaagagatcgtagcaatcttccaaccgcatacctttactagaactattgccctgttggacgaatttgcccacgctttgaaccaagcagatgctgtttacctagcgcaaatttatggatctgctcgtgaagtagaccatggtgatgttaaggtagaagacctagccaataaaatcaataagaaacaccaagtgatcaccgttgaaaatgtttctccactcctagaccatgataatgctgtttacgtcttcatgggagcaggagatatccaaacctatgaatactcatttgagcgactcttgtctaacttgacaagcaatgttcaataggatttttctatggaaattccaattaagatcattcaggcaagtaagtctgatttggctgagatagagacacttcaggcctcatattttccagctgaaaagcagcaaccttcccatattttagaagaaagtatccgtaagtctgcggatacctttcttctagctagggatgaaaatcagcttctgggctatgttctaggtggtcctcagccccacaatccgaaatgtctagaaatacactctttagtcattgatactgaccatcagagacagggcttgggaacgcttcttcttgcggctttgaaagatgtggcagttaagctggattacaaagctattcgtttgaagagtccggatgagttgctttcctattttgaaatgaacggttttattgatgaagaagagacaaattcgctttatgcagctagtcaaggctttagtatgatttggtttaatctctttttttaggaggcacaatggaaattaggaaagcaagattagaagatttggatcgtatcgttgagattgaactagaaaatttctctgctgaagaagctattcctcgctctatttttgaggcgcatttgcgagagattcggacctcttttctggttgcagaaaaagaaggcagaatcatggggtatatagaagggccagttggaccgcaccgccatctgcaagatcagtcttttacagaagagatagaagattatagtcataagcctggtggttatatctctgtgacctgtctttctattgccaaagaatcacagggacttggacttggtaaaaaattactaacatccttgaaagaactggctcttgaacacgaaagagaaggcattaatctaacctgtcatgactatctcatcgcctactacgaaaagcatggatttgtcaatgaaggtaagtcccagtcaacctttgcaggggaaacctggtatgatatggtctgggaagctaaaaaataagctagaaaagcatgctaggttgcttttctttcgtttttaagatataatattatggattgtcaacgaggaggataaacttttgagtgaaaagccaagagaagacgaaaaattaagctttaaagagcagattttacgtgatttagaaaaagtaaaacgttatgaagggattcgtcaagaggccgctgaacttgatgaaaaaaaatcagctttgtctgtccctgacacaaaaattgctgatgaagaagtgatgaatgcatccctatcagctgttgaaaaaattatggagaatgcaccacgtgttccacagcatcctagtgaagatgtgcctgcatcaccggcggaggaactaagagaggaagctccaatcgttcctagtcaccctagtcaagatgttccagcttcaccagctgaagcaagtccatcaagaccggttccaggaccagatgtcaatcgtccacaaaaggtcgaaagagatttgaacacaactccaacaagagtagctgtttcttataaaactgaagaacaaaaagagacacaagcagaagcgccaagacctgaaccggtcgtcgaagcggaagctgttgacgtgatttctgaaactccacgtcgtagtcgtcgtgagacagttaaacctgtcaagaagaaaaaatcacatttgaaagctttcttcatttctctattgattttccttgccttgatttcagcaggtggttacttcggttaccagtatgttcaatcatctttattaccagttgatgcaaattctaaggaatatgtaacggttcaaatcccagaaggatccaatgtccaagagattggatcagcacttgaacattctggtgtgattaaacacggagtgatttttgctttttatgctaaatataagaattattcagatttgaaggctggatattacaatttgcaaaagagcatgagtacagaggatatcatcaaagaactacaaaaaggtggtactcctgaacctcaagaaccttcacttgcagatttgaccattccagaaggatataccattgatcaaattgcccaagctgtaggccaattacaaggtgaatttaaagaacctttgacagcggatgctttcttggctaaagtgcaagatgataactttatcagtcaagaagttgctaaatatccaaacctactcgaaagcttgccaacgaaagaaagtggagctcgttaccgtttggaaggttatcttttcccagcgacctactctatcaaggaaagcacaactattgaaagtttgattgatgagatgctggcagccatggataagaccttgactccgcactatagtgcaattaagtctaaaaacttaacagtcaatgaattgctaacaattgcttcacttgttgaaaaagaaggtgctaagactgaagaccgtaagttgattgcaggtgtcttctacaatcgtttgaaccttggtatgccacttcaaagcaatattgcaatcttgtatgcccaagggaaacttggccaaaatatcagcctagcagatgatgctggaattgacacatcgattaattcaccatacaatgtttatacaaaacctggtttgatgcctggtccagtagatagtccaagtcaggacgcgattgaagcaagtatcaaccaaacaaagagtgagaacctctactttgtagccaatgttacagatggtaaagtctattacgcagtgacacaggaagaacatgatcgtaatgtagctgagcacgtcaatagcaagcttactcaaaatagtagttcaaactaagactacaaaaatgagaatctcagatagagattcaatactatcgaaagaaagttgagaaaaatggcagaaaaaacatatcctatgacccttgcggaaaaggaaaaacttgaaaaagaattagaagaattgaaattggtccgccgaccagaagtggtagaacgcattaagattgcccgttcatatggtgacctttcagaaaacagtgaatacgaagcagctaaggatgaacaagcttttgtcgaaggacaaatctctagcttggaaacaaaaatccgttatgctgaaatcgtcaatagcgactcagttgccgatgatgaagtggcgattggaaaaacagtcactatccaagaaattggtgaggacgaggaagaagtttatattatcgtaggttcagccggtgcggatgcctttgcgggtaaagtttcaaatgaaagcccaattggacaagccttgattggcaagaaaacaggtgacacagcaaccattgaaacacctgttggtagctatgatgtaaaaatcttgaaggttgaaaaaacagcctaaaaacagaaaaaaggagtgaggaggcagtgcgcttcactcactcctttttccattttaaattgaattggagacgttatgagttcaaagaagaaaaaaaataagatggagcgtggtctgaccaatcgtcacgtgcaggttatggccattgcgggaacaatcggaacaggactctttttgggagcggggcgctctatcagcctaacaggtccttccattgtactgatttatatgattacaggggccttcatgttcctcatgatgcgtgcggttggggaaatgctctaccaagaccctgagcaacatacctttatcaactttatcacgcgccatttaggtaagggctggggttatttctcagtttggtcttactggctatccgttgtctttatcggtatggcggaaatcactgctatctctcactatgttcagttctggttccctagctggccaagttggatgattgagattggatttttgactattctagccttggtcaatttgattgcggtgaaactctttggggaagttgagttttggtttgcgatggtcaagattgtggctattttagccatgattgccacaggagtctttatggtcttgacaggctttaagacaccacatggagtagcaagtttggctaatatcgccgacaatttctcactatttcctaatggtggagttaactttgtcatggccttccagatggtgttctttgcctacctcatgattgagtttattggggtaactacttcagaaacaaaaaatccacgccaggtcttgccaaaagctgttaaggaaattcctttgcgtatcgtctttttctatggtggagctcttttagccattatgtctattattccatggcgtgaacttgcttcagctgattctccctttgttacggtgtttgaattggccggtatcaagtgggcggcagccttgattaacttcgtcgttttgacctcagcagcatctgctcttaactcaaccctttattcaaccggtcgtcatttgtaccagattgcccatgattcaccaaatccattcttaaaggctattaaggcagatactctttctcgtcataacgtgccacaaaatgctatcattgcttcagcaattttgattgccctagcagcctttatcaatgtcttgccaggtgtttcggatgcttttgccttgattacggcatcatcatcaggtgtctatatcgccatttatatcttgattatggtggctcaccttaaataccgcaagtcaccagactttatggcggatggctacctcatgccccactatcgtttcttaaatcctttaaccatgctattctttgcctttgtctttgtaaccctctttttacaagagtctacctttgtaggagcaatcggttcagctatctggattatcggtttcgggatttacagccagtggaaatttagaaaatagatttgaaactcatcaacttagcttggtgggtttttgctagtttgacagtctattgaaataagactataatcaagctgtatcagttttcgaggaggtttggatgtactttagattggaaaatgaggaatcccagaaagcacaagaaattgggaatttgattcgtgcttataaccgttccaaaagagaagaggctgaaagtgtgccacttaatctttatgtagaagatgaaaagggatatctcctggcaggtctggtagctgagactttcggaaattggttggaaatcgagtatttgtttgtaaaagaggaactgagagggcaaggaatcggttcaaaactattgcagcaagcagaaactgaagctaagaatcgaaactgtcgttttgcttttgtcaatacttaccagtttcaagctccagatttttataaaaggcatggctacaaggaagtctttaccttacaagactatccctacattgggcaaagatattattaccaaaaagatttgtaaggtgaatatgaaagtataaggcaaagaggggttcttgacataggtatgaaggggattctcgataaataccagttaaatcctacaaattgtgtctttctagacgatatggaggacagtacaatcgtagctgagacattagatgtgaaatcctacgatgctgtagatgttttgaaacaaattgaataagcagaaactctctatctttttttggtagagagttttttgttaataaaattttacaaaatgacatttataaattgcattaagttagatatatgatataatgttgttaaaaagaggcgcaactttttaaaactataaggaggacgcaggtggttaaaaatttaaaattaaaattagctcgggttgagcttgatttaacacaaggtcaactggcagaggctgttggggtgacgcgccagactattggtttgatagaggcggggaaatacaatcctagtctttccctctgccagtccatttgcagatgtttaggcaaaactttggatcaattattttgggaggaagaagatgaaaaatagatttttttattatcaattactagacgaaagagaagaacaactgatcaataaagcgggggctgaaagtttctatatctctatagctttcttgattttatcttatatgattgcagtattagcaccaagtctttttaatccgagaatgattctcatcactatcattattggaacttcttactttttcggccgtgctcgagattttggtgtgaactactatagtcgttttcattttacaattttagggtgtttgctggtaactctcgctattacgactcttttgatgttgcagaattatcaattcaacatagaaatttatcagcacaatcctttgaaccttaaatacttatctgcttgggtcattacttatctgatttaccttccttgggtttttatcggtaatctcggccttaaaagttatggcgaatgggctcagaaaaaatttgaacaagatatggatgaactggagagtggagaatagcttgttactcttttctcaatccagccaaaatgtgttataatagtactaatttattggaacacatgaaagttcttgaaattttcattggtttctagttaaggaagtaggaaaagtatgtatccagatgatagtttgacattgcacacggacttgtaccagattaacatgatgcaggtttactttgaccaagggattcacaataaaaaggcggtctttgaggtttatttccgccaacagccttttaaaaatggctatgcagtttttgcaggtttggaaagaattgtgaattatcttgaagacttgcgtttttcagatagcgatattgcctatttggagtcgctgggctatcatgggtcattcttggactatctccgcaatttcaagttggagttgaccgttcgttctgcccaagaaggggacttggtttttgctaatgaaccgattgtgcaggtggaaggccctctagctcaatgtcaattggtcgaaacggctcttttgaacatcgtcaactaccagaccttggtggcgactaaggcagctcgtattcgttcagtcattgaagatgaacccttgatggagtttgggacacgtcgggctcaagaaatggatgcagctatctggggaacacgcgcagcggtgattggtggtgccaatggaaccagcaacgtgcgtgctggtaaactctttgacattcctgtcttgggaacccatgcccatgccttggtacaggtttatggcaatgactatgaagctttcaaggcttatgctgcgacccacaaaaattgtgtctttcttgtggatacctatgacacccttcgcattggggtaccagctgccattcaggtggcgcgtgagctgggtgaccagattaactttatgggtgtgcggattgactctggggatattgcctacatttccaagaaagttcgtcagcaattggacgaggctggatttacagaggctaagatttatgcttcaaatgatttggacgaaaataccatcctcaacctcaagatgcaaaaggccaagattgatgtctggggcgtgggaactaagctgattacagcctatgaccagccagctcttggggcagtttataagattgttgcaatcgaagatgaaaatggccagatgcgcaataccatcaagctgtcaaataatgctgaaaaagtgtctacaccaggtaagaagcaggtgtggcgcattaccagtcgtgaaaaaggcaagtcagaaggagactatatcacttttgatggcgtagatgttgccagcatgacagaaatcaagatgttccatccgacctatacttacatcaagaagacggttcgtaattttgacgctgttcctctcttagtggatatcttcaaagacggaaaattgatttacaatctacctagcttgactgagattcaggattatgctcgtaaggaatttgacaagctgtgggatgaatacaagcgcgtgctcaatcctcagcattatccagtggatttggcgcgtgatgtatggcaagacaagatggacttgattgacaaaatgcgtaaggaagccctcagtgaaggagaagaagaatgagtttgcaagaaacgattatccaagagctgggtgtcaaaccagtgattgatgcccaggaagaaattcgtcgttccattgatttcttaaaaagatacttgaaaaaacaccccttcctaaagacctttgtattagggatttctgggggacaagactcaacattagcaggacgattggctcaactggccatggaagaactgcgagcagagacaggggatgatagctacaaatttatcgctgtccgcctgccttatggagtacaagccgatgaagcagatgctcaaaaagccctagccttcatccagccagatgtcagcttggttgtgaatatcaaggagtctgcagatgctatgacagctgcagttgaagcgacaggtagtcctgtttcagacttcaacaagggcaatatcaaggctcgttgccgtatgattgctcagtatgcccttgctggttcccatagcggagcagtcattggaacagaccatgctgcggaaaatatcacaggcttttttaccaagtttggtgacgggggtgcggatattctccctctttaccgcctcaataagcgtcaaggaaaacaacttttgaaggaacttggtgcaaatccagccctttatgaaaaaatcccaacggcagacctagaagaagacaaaccaggcctggctgacgaagtcgccctcggagtcacctatgcagagattgacgactacctagaaggcaaaataatcagcccagaagcccaagcaagaatcgaaaactggtggtacaaaggccaacacaaacgccacttacccatcaccgtatttgatgacttttgggagtgaaaacctccagtggaggttttcagcctctcatcttgaaataagaaagtgagagaaggtcctgtggacctttttaccctgagcctagaaatgagaaagcgaggaaggtcctgtggacctttttagattcttgccctgaaatcaaaaagaaagaaaaacctccagtggaggttcttaccccgagcatgaaaacaagtaagtgaagaaggtccgtgtgaccttcttcgcttattaccttgaaattcaaaagcaaagtaaatctaaattgaggttgggcagagaatcatctatcagaaagtgaggtagcgtaatgaaatctatcggtacgcagatattacagacagagcgtttaatcttgcgaagatttgtggaaagtgatgcagaagctatgtttcagaattgggcttcatctgctgagaatctaacctatgtcacctgggatccccattctaatgtcgaaatcactcgaaactcgattcgaaattgggttgcctcctatgctaatcccaactattacaaatgggccatttgtctcaaagaaaacccggagcaggtgataggagatatcagcatcgttgcaatagatgagaacgattcttcttgtgaaattggctatgtgctaggcaagaaatactggggtcatggtatgatgacagaggccttgaaagctgtcttggacttttgttttactcaagcaggttttcaagatgtcagagcacgatatgctagtctcaatccagcttcaggtcgtgtcatggagaaggctggaatgtcctatctcaagactattaccaatggtgtagagagaaaaggctatcttgctgaccttatttattatcagataagtagggaagactagtgaattttcttttctgtttccatcaaagtcagactgtgtctggctttttttgcaacattttttacataatctgattaaattcctatttttccctatcattgtccatgttttttcttgagttttggggctataatagtcctatcaaatcaaagaatggaggaaagcaatggataatataatcttttttatcagtgtttttcttgctggaattctctccttcttttctccttgtattttacccttgttaccggtctatgcaggggtcttgttggatgacaaagatggtgctcagacttctagtagcaaattttcaatctctgttgtcagtttattgcgaactctggcctttatagtgggtatttcctttatttttattttactgggttatggagctggttttttaggcaatttgctatatgcttcttggtttcagtatgtgacgggtgcggttatcattctcttgggcttgcaccagatggaagtcttacatttgcaggggctttacaaggaaagaaggctacaattaaagagacaggggcaaaagggtaagggctatagtcaggcatttttactgggattgacctttagttttgcttggacgccatgtgtggggccggttctaggctctgttttggccttggcggcttcaggtggtgctggagcttggcagggagctggtctcatgttggtttacacgctgggtttggcgctaccatttttagttctagctcttgcctccagctatgttttgaaacatttccgaaaacttcatccctatctaggaaccctcaaaaaagtgggtggtttcctcattatcgtgatgggaatcttggtgcttttgggaaatgcttccattttgactacattatttgaatagagaggaaaaagaaatgaaaaaatggcaaacatgtctccttggagtaggctcaatctgttgcttggcagcctgttctgctaaaaatatgtcagacgaatctactatgaaggagcaaacaaaaacagaacaagttagttcgcaaactgcgactaaaggtcaggcggttgctgattttgaactgacgggagtagatggcaagacttaccgtttatctgattacaagggcaagaaagtctatcttaaattctgggcgtcttggtgttccatctgtctagccagtcttccagatacagatgaaattgctaaggatgctggtgatgactatgtggtcttgacagtggtgtctcctggacacaagggggaacaagctgaagcagactttaagaactggtacaagggcttggattataaaaatttcccagttctaattgacccatcaggtaaacttttagaaagttatggtgttcgttcttacccaactcaagcctttatagacaaggaaggaaaactggtcaagacgcaaccaggttttatggataaggatatgattttaaagacattgaaagaaatggggtagagaaagatcatgaatgataaagtaaaattgtttgtcttggcaggaatctttttcctagccataagcggtttctattttctattgatgcgaaatgcagggcagacggatagctcgcaaattgagaaagcatcagttagccaaggaggaaaaacagtgaaaaaaacagaagtgagtaaagatgcagatttgcacgaaatttatctggctggaggttgtttctggggagttgaggaatatttctcacgcgttcctggagtgacagatgccgtatcaggctatgcgaatggtagaggggaaacaaccaagtacgaattgattaaccaaacaggtcatgcggagactgttcatgttacctatgatgctaatcaaatttctcttaaagaaatcctgcttcactatttccgcattatcaatccaactagcaaaaataaacaaggaaatgatgtgggaacccagtaccgtactggtgtttattacacagatgacaaggatttagaggtgattaaccaagtctttgatgaggtggctaagaaatacgatcaacctctagcagttgaaaaggagaccttgaaaaattttgtagtggctgaggattaccaccaagactatctcaagaaaaatccaaatggctactgccatatcaatgtcaatcaggcggcctatcccgtcatcgatgccagcaaatatcccaaaccaagtgatgaggaattgaaaaagaccttgtcacctgaggagtatgcagtcacccagaaaaatcaaacagaacgagctttttcaaaccgttactgggataaatttgaatctggtatctatgtggatgtagcaactggtgaacctctcttttcatcaaaggataagtttgagtctggttgtggctggcctagttttacccaacccatcagtccagatgttgccacctacaaggaagataagtcttacaatatgacacgcatggaagtgcgaagccgagttggagattctcaccttggccatgtctttacggacggcccacaggacaagggtggcttgcgctactgtatcaatagtctctctatccgctttattcccaaagaccaaatggaagaaaaaggctacgcttatttactagattatgttgattaagagggctttcctaagcagttagaggagaattttgctatactgatactagtaagtgacaaaggagagaagcatgacctatacaatcttaatcgtagaagatgaatatctggtaagacaaggattgaccaagctggtcaatgtagcagtctacgatatggaaatcatcggtcaagctgaaaatggaaggcaggcttgggaattgatacaaaagcaggtgccagatattattttaaccgatatcaacatgcctcagctaaatgggatccagttggccagtctggtccgagaaacctatcctcaggtgcatttggtctttttaacaggctacgatgattttgattatgccttgtctgctgtcaaactaggtgtggatgattacctactcaagcccttttctcgtcaggatatcgaggaaatgctggggaaaatcaagcaaaagttggataaggaagagaaagaagagcagttacaagatttattgactgataagtttgagggaaatatggcccagaaaatccagtcccatctggctgatagccaatttagtttgaagagtttggccagtgacttgggttttagcccgacttatctgagttctttgattaagaaagagttaggcctgccttttcaggattatctggtgagagaacgtgtcaaacaagccaagcttttgcttttaactaccgatctgaagatttacgagatcgcagagaaggttggctttgaagatatgaactattttacccaacgttttaaacagattgcaggtgtgacacctcgccagtttaagaagggggaagatcgatgaaacgttcttctctcctagtcagaatggttatttccatctttctggtctttctcattctcctagctctggttgggactttctactatcaatctagttcttcagccattgaggctactattgagggcaatagccaaacgactatcagtcagactagccactttatccagtcttatatcaaaaaattagaaaccacctcgaccagtttgacccagcaggcagatgtcctaacctatgctgagaatcccagtcaagaaaaggtcaagggaattcgagatttgtttttgaccattttaaagtcagaccaggacttgaaagctgttgtgctggtaaccaaatctggtcaggtcatttctacggatgatagtgtgcagatgaaaacttcctcagatatgatgactgaggattggtaccaaaaggctattcatcagggagctaaaccagttttaactccagctcgtaaatcagatagccagtgggtcatttctgtcactcaagaacttattgatgcaaagggagctaatctgggcgtgcttcgtttggatatttcttacgaaactctggaagcctatcttaaccaacttcagttgggtcagcagggctttgcctttatcatcaatgaaaaccatgaatttgtttaccatcctcaacacacagtttatagctcatctagcgaaatggaggccatgaaaccctacatcgagacaggtcagggatatacccttgaccacaaatcctacgtcagtcaggaaaagattgctggaactgattggacggtgcttggcgtgtcttcgttggagaagttagaccaggttcggagtcaactcatgtggaccttgcttggagccagtttcacatctcttcttgcttgtctctgcttggtgtggtttagtcttaaacgctggattgcccctttgaaggatttgagagaaactatgctggaaattgcttctggtaatcagaatcttcgtgccaaagaagcgggtgcttatgaattgagagaggtgactcgccagttcaatgccatgttggatcaggttgatcagctgatggtagatattcgcaggcaggaagaaacgacccgtcagtaccaacttcaagctctatcaagccagattaacccccatttcctctataacaccttggacaccatcatctggatggctgaatttcaagatagtcagagagtggtgcaagtgaccaagtccttggcgacttatttccgcttggcgctcaatcagggtaaagatttgatttgcctgtctgatgaaattaatcatgtccgccagtatctatttatccagaaacaacgctatggcgataagctggaatacgaaattaatgaaaatcctgcctttgataatctagtcttgcccaagctagtgctacaacctcttgtagagaatgctctttaccatggcattaaggaaaaggaaggccagggacatattagagtttctgttcagaaacaggattcgggattggtcatccgcattgaggatgatgggattggtttccaagacgctagcgatagtagtcaaagtcaactcaaacgtgggggagttggtcttcaaaacgttgaccagcggctcaaacttcattttggagaagattaccaaatgaagattgattctgtcccctcaaaagggacgacagttgaaatatacataaatagaatagaaactagttaactcccagtcaattctgggagttttatgcgtaattgggcaagctttctaggttgtctatcttgctaaaacgtagaaaaaacgatatgatagataatgacaaaagaggtatcaagtatgaaggaaaaagacattcaaagagaaacaagccagattgtaaaagatgtattagaaaaggccaatttgaagcagggatctatctttgttttgggcctttcttctagtgaagtgataggtggtcagattggcaaggaatccagccaagaaattggggaaatcattgtgaagaccatcctagatatcctagaagaaaatggaattcatctagccgttcaaggttgtgaacatgtcaatcgggccctcgtcgttgaacgtcaggtggcagagcagtttggtctggaaatggtcagtgtccttcctacccttcatgcaggaggttcaggtcagttggcagccttcaagtttatgcaagatccagttgaggttgaatttatcaaggctcatgctggattggatatcggagacactgcaattggcatgcatgtcaagcatgttcaggttccgattcgccctcttttgagagaaattgggcatgcccatgtaacggctcttgctagccgtccaaaattaattggaggtgcgcgtgcgcattatccacaagattctatcagaaagtcgtgagaatgaaaaaaacaaaacaacaactagaaaaaatcaccaaatattcgattcgtaagctaactgttggggtaggtcctgtagccatcggggccttcctttttggtgctagtaccctttcagtagataaggttcaagccaatgaagtcggcggtgctcatagcgttcattaccgttatttggcggagcaggaattgaccgagtctgaaaaagccctgattcaccatgaagttcctacagaatttcaagatgatgatattctttatgtagtttatcgcaagaaggcaactaccagtcaacaacttccttatacaggaagtaaggaactagctttggcaggtcttggcttggcaacggcttctctagcagtctttttggtgtccaaaaaaggtcgtagagaagttctaggtgttctcttgattggttctttaggagccagcacctttgtaccttatgggacattcgcatttgaaaataaagaattgctttcttataaccaaactatttcagcctctacacatgaaggcttggctgaagggattatccatattgatggctatgaatacattggctacttcaaggaagcagaactccatccatcaagaccagcttcagctgaacagactcagttgccagtagagaagcaaagttcaaaagaaatcgagaaaactgaagtcgttcaagaaagacctgctgttgctccagaaactatcgttgagaatcctgtagtagagaatccagttgctcctgctattgaagaaaaaccagtttctgagaagcctcagacaagacaggaagagagcttggtggagattccgtttgaaacagtcacaaatccagatgcgaatctagcagaaggacagactcgtatcgtcgcagctggagtaaatggtcagcgtcgccttgtaagcaaagtttcgatggtcaacggtcaagaagttagagaagtcatcgaagaccaagtagtccaaaatcctgtgtcgcaagtcattgcagtcggaactaagaaagaggtgcaacctgctccaactccagtaccacaagctgaaccaagtcaccaagtagctaaaggtacacaagaagaaggtaagacaggacaatccttaacgcaaccagaattgccagaggcttcagtagaagcaaaaggaacccaagaagaaggtaaagaaggtcaatccttaacacaaccagaattgccagaggctccagtagaagcaaaaggaactcaagaagaaggtaaggcaggacaagctctaacacagccagaattgccagaggctccagttgaagtaaaaggtacacaagaggaaggcaaagcaggtcaagctcttgtacaagaaccgttacctgagtacaaagtaactgagggaacccttgttgaaacatcgactacagacctagactacaaaactgaaacgactgaggatccaactaagtatacggacgaagaaactgtcgtaagaaatggagaaaaaggtagtcaagttactaaaacaacttataaaacagtagaaggtgttaaaactgaccaagttctttcaactagcacagaagttgccaaggagcctgtaaaccaacaggtaagtcgtgggataaaaccaattgaaggaactcttgtagaagaaagtcttgaaaagattccatttaaggaagttgttaaagaagatgaccaactgaaaaaaggcttagaagttgtagctcaagaaggaaaagaaggccagaaaaaaatcaccaagacctttaataccattaagggagttaaaacagaggacgctccaaaagttacagaggaaatccttgaggcacctcaagacaaaattttgaaacgtggtactaagaactttgaaaagccagtattgaccatcacagcagttgaacctaaggatttgaaacgtacttcagatgttaagtatagtctagaaaatccaagtaaggcagtcattaaatctatcaccctaactctgaaaaaaggtgatgagattgtcaaaactttgaatgtttcgccagaagacctaactgctaatttaacagatttacagtactacaaggattataaacttgaaaccaagatggtttatgaccgtggtgagggtgatgaagaagaaattctgaaagaagaacctctaagaattgacctcaaaaaagttgaaatcaagaacatcaaagaaacaagcttgatgagtgtagacgctgatggtaatgaaacagatactagtttattgacagcaaaaccagctgatgttgctccactttatttacgagtgaccactcatgacaataaaataacaagactggctgttgacaagattgaagaagtagaaaaagacggaaaaactttatacaaagttactgccaaagcacctgatttgattcaacggaatgctgacaacacactgaacgaagagtatgttcattactttgaaaaacaaaaaacacacgaaggtgatgtatattatagctttgacgaccttgtaaaagctattcaaaaagacccgactggtacatttaagcttggtagcaatatcaatgctgctaacgttaaaccagcaggaaaatcttatgttactaatgctttcaaaggaacattgacaagcactgacggtaataaatttaccattagcaatatgaacagacctttattcggtgatattgtcggtggtactgttaaagatttactacttgaaaatgtaaatatcgacatgccagggactgataggattgcaccgctagcgaatgttatcaaaaataatgcgactgtagagaacattaaagtaacaggtaacgttgttggtaataatgatgtatctggtgttatcaataaaattgatggtagtggaaaattaagtaacgttgcatttatcggtaaagtacacgctgctggaaatcgcggtggttacttaacaggtatcgtcggtgaaaactggaaaggtattgtagaaaaagcttatgttgatgctgaaatcacaggtaacaaagctaaggccgctggaatcgtatattcatctcaaaacggtggcaacaacaatactttaggtaaagaaggtactcttcgaaactctgtagcaaaaggctctattgaactcaaagaagccgttatgtctggtggactgctagggactaactgggcactaggggctatagaagacaacatcactatgatgaaagttaagactggtgaaatggtctttggtcattctgatattgatgctgatgattactttacatactctagaacgaagcgcaattacagtgttgagggtgtaagtgaaggtaaaacaacttataataattctaaaaaaattcctagcataactaaagaaaaagctgatgaattaatctctaaaatgggaatcactgctgataaatttgaaagcacacttcctgttgaagataaactgaacaatattgtaagtaaagctaatcaatacaaaaatattgatgactacgatgcttctcgtgagcttgcttaccgtaacatcgaaaaacttcagccattctataacaaagaatggattgtcaaccaagggaacaagcttgcagaaggttcaaacttattaacgaaagaagtcttgtctgttactgcgatgaaaggcaatgactttgtcacagaccttacagatgctgaccatattttggttcactacgcagataagacaaaagacatctttacaatttcaccgaaagaatctaaagtgaaacaagtgaaagaatacagcgtggctgaattgggtgaagtcgtttatacaccaaacatggttgttaaagatcgtacagatttaatcagcgctatcgaaagcaagttaagtccagtagaattacaatctgagccgatttaccaacacttgggtagaactggtggcaacaaagtcaatgcaattaaagatttgtacttagaagaaagcttcaagtatgttaaagataatcttaataaattcgttacgaagttagttgaaaatgaagatcaccagcttaacactgatgaagctgcaaaacgtgccttgattaagaaaatcgatgacaataaggccgcagttcttcttggtttgtcttacctcaaccgttactacggagttaaattcgatgactttaatattaaagaattaatgctattcaaacctgacttctatggtaagaatgtaaatgtgttagacttcttgattaaggttggttctaaagaaagtaacattaaaggtgatagaactttagaagcttatcgcgaaacgatcggtggagttattggtataggtgagttaaacagtttcttagactataatatgcgtctattcacaagtgacacagacttaaacgattggttcataaaagctactaaagataatgtatatatcgttgaacctaaaacaacaactcctgaatttgctgataagaaacacagagcatacgaaggattaaacaacgatgttcacggtaagatgattttaccacttcttaacttaaaagatgcgcatatgttcttaatctcaacatataacactatagcatacagttcatttgagaaatacggtaagaatactgaagccgaacgtgaagcattcaaagctgaaatcaataaagttgctaaaggtcaacaaaattacctagatttctggtctcgtctatcattggataaagttcgcaaccagctgcttaagagcaataacatggtgccaacaccagtacttgataaccaaaactataaaggaatcagcacagataaatatggatatacgaatagtggtaaggatgtagcgcctatccgtgaattgtacggaccaacaggtcgttaccacgcaactgactggcgtatgggagctgtagctcgtatctacggtaatccatataaagatgattcagtcttctttatggtgacggatatgattagtgactttggtatctcagccttcactcacgaaacgactcacgtaaatgaccgtatggtttatttaggtggttcaagacaccgtgaaggtactgacctagaagcatttgcacaaggtatgctgcaatcacctgctgaaacaagtccaaacggtgactttaaagcactaggattgaacatggcctacgaacgtccaaacgatggaaaccaatggtacaacactaatccaaatgaccttacttctcgcgctgaaattgatcattacatgaaaggtttcaatgatacgcttatgcttcttgattatcttgaaggagaagctgtaattgataaaggcagtaaagaactaaacaacgcttggttcaagaaagtagataagcaacttcgtggagctaatacgaagaaccaatacgacaacgttagagatttaaatgcagaagaaaaagaatataatttaacatctgttaacgacttagtagagaaaaacttcatgaccaaacacggtcctggtaatggtcagtatgatccaactggatttggctctgcctatgtaactgtaccaattacagctggtatctatggtggtaatacgagtgaaggtgctccaggagcaatgtcattcaaacataacaccttccgtatgtggggttactttggatatgaaaaaggcttcctaaattatgcttctaacatgctgaaaaatgagtctaaacaagcaggtcatgctactctaggagatgacttcatcattaagaaagtttctgatggtaaatttaatactctagaagattggaagaaagaatacttcaaagaagttgttgataaagcgaaagcaggatttaaccctgttacaatcgacggtactacatacagtagttacgatgacttgaagaatgcatttgttgctgccgttgataaagataaagcaactcttaataatggttcagttaaatttgataataccgtatcacttaaagagaaaatcttcaagaaacttcttcaacaaacaaacagctttaaaacttcaatctttaaataattttgttagtcctgaagggactgacttaatctcaaaaaggagaggcaagtatgtcttctcctttttatttatgtagtgattgactgttcatttacaagcataattattgaatatatttataactaaaatactagaaaatagattttcaaaaagtaaatgaaatgtcaggcagggctttgttttatggattctgttctagttcaaacaacttgcaaaaatagcttaaaaattataaaattaaatataaagtaatttgtaaatacgcataaagtttaatatgatataatgtgtatacagataagagaaaaggaaatattataaatgaagaacaagctttctgataagtcccttgagaatcagagaaaagaaaaaatcatgcgtttctccattcgtaaatatagttttggtgcagcgagtgtagcggttgctgcctttttaatgtttttaggaaatggagcagttgcagctgatcaattgaaagtaactgaagagtcttctagtaaagtagagttggctcaatcaggtggggagaaggctgaaaatcagagtgagtccaaaatcagtgagccaaaaattagtaaaccagaattagataaaagccaacttgcaaattatattggtgaaattgaaggtaagatttcaagtggagcctacgctaataagacagaggaaagtgtagcgagtctagctgctgaattggctaatgccaaagcaactttagcgaacgcaagcagtcaagaagaattgacgagtgcctatcaaaaactggttgctacagttaactcaaaattacgaaataagctggttgagaaaaaagaaattgtttcaacagatacaactgaaggtaaagaaacagttggtatcaaagctgataatactgagaaaccatcagaatcaaatgcgattgaaaatactggtgccaatgatccacgtaatgggagtgaaattgaaaaggatacaacattccgtgcagctgtgaatcaagatcctaaggtagactttacattctccataccagatgagaagaaaatctatatctataacgaagagcatttctcattagaaattcctgtttattctgaaactggaaagattcgttatgcaacgattaagaaaggatctagacaaagattccctaatgttgcaggtacagataatgacttggatgttgaatttggatttactgctagggtaataaatcgtgctgaaacggcaggggtaacatcggaggcgagtcaagcaaatcctgcgaaaatcgttattacaggtcgtccaaacgatatactgaaaaaacacagagattatacaaaacaagaaaaccaaacacttaacgtgggtactcgttatattcaggtggttgatgatcaaggtagagagaatcttaaaaaaggtgatagtattgcagacccagggtatttctacttagtattaaaagctcaatctaagaaatattcattaagatctcaacctacagatgaaaagatttctgtaactagtttgacaaatcctacagcagaagacttgcaaaaaatcaaagatagtattcaactagaatattcaacaacaaacgaagatgcacgatttgctgataaacgtggaactttagttgaacatcctgaggatgttatccaatctgttaatatcgttgggaataatatcgttgtgacatttacagatggttctacgaagacaaaaccagtaagtgaaattgtacaaaaaaatgttccgccggttgttaatctaccgtattcaaacgaagcgaacagaaatatttatatctattctggagaagagacagacctaacatttactgcaacggatgagtctaagattaaggacctaaaacttcgtggccctggtgacattaactataataatgcaactagttttggtttagcagtagggaatattgttgatagcgcagtaacaagcggagcgggttctgtttctgaagataagaagacagcaaccattaaaatgactggaacaacgaatttaactgctgggaaaaaatggacaagtgttatcgttgcaaaagatgacaacaatggagaaagtgcaccttttaacggaagaattaatgcaactactaatcctgcagaacgtcaaaaaattgaaggttatgttgaatttgttgtaaaaaatcaaactactaaatatgatattaagactccagaaggaacagttagtgtagtagatccagcgaatgttacggctgacgaatttgaaaaaattaaagaaaaagtaaaaatcgaatactctcaaactaacgatgatgctaattttactagcaagagaggacaagctgtagacaatcaggcgacaagaatttctacgattacaaaagatgctaatggaaatcttgttgtgacctataaagatggttcaactgatacaaaacctttatcagaattcacaagtttaaataaacaacctgcaattgatgcggttaacaaggctgctgaagataaaattgcagagattaatgctaatacaaacgcaactgcagaagaaaaagcagctgcaatcgaaaaagttaatgccgataaggcgaaagctttaacagcaattaatgataactcggtaacgacaaaagcagcattagataatgccaaaacatctgggacaacagcgattagcaatgataatcctgtagtaacgaagaaaaatacggcaaaagcagctattgactcagctttaagagcgaaagaagcagccatcgatgcgaatgacgacttaacgacagaagagaagaatgcagcaaaagcagatgcacaggcaaaagcgaatgcagcaaaaacagcaatcgataatgcaacaacaaacgtagcagtggactcagcccaaacggcaggaacaacaagtgtaagttcagtaatgccaacagcggtagcgaaaccagcggctaagaaagcaatcgaagacgcgctgaaagcgaaagtagcacaacttgatgcaagaaatgatttaacaactgaagaaaaagaagcagcaaaagcagatgcacaagcaagagcaacagcggctaaaaataatattgatactgcaacaacaaactcaacagtagataatgcgaaaactacaggcgttgctgatgtagaaagcgttaatccgcaagcaagccaaaagaaaactgacgcaaaaaatgcagttgatgaagcgttaaaagcaaaagaagcagagattgatgccaataacgatttgactgctgaagaaaaatccaaagctaaggaagacgcaaaatccaaagcagatgtagcaaagcaagccatcgacaacgcgacaacaaacgatgcagtaactcaagctaaaaacgctggggcaatatcagtagattcggtgactccaacgccggtagccaaaccagcagcgaagcaagccatcgatgacgcattaaaagctaagaatgacgcaattgatgccaacaacgatttgacagacgaagaaaaagcaaaagctaaggaagacgcgaaagcgaaagcagacgcggcgaagcaagcaatcgacaacgcgacaacaaacgatgcggtagaacaagctaaaaatgacggagcgacaagtatatcttcagtaactccaacaccaacagctaaaccggctgcaaaacaagccatcgatgacgcattgaaagcaaagaatgacgcgattgattccaataacgatttaacggctgaagaaaaagccaaagctaaggaagatgcgaaagccaaagccgacgcagcgaaacaagcgatcgacaacgcgacaacaaacgatgcagtaactcaagctaaaaacgctggggcaacatcagtagattcggtgactccaacgccggtagtcaaaccagctgcaaaacaagccatcgatgacgcattgaaagcaaagaatgacgcgattgattccaataacgatttaacggctgaagaaaaagccaaagctaaggaagatgcgaaagccaaagccgacgcagcgaaacaagcgatcgacaacgcgacaacaaacgatgcagtaactcaagctaaaaacgctggggcaacatcagtagattcggtgactccaacgccggtagtcaaaccagctgcaaaacaagccatcgatgacgcattgaaagcaaagaatgacgcgattgattccaataacgatttaacggctgaagaaaaagccaaagctaaggaagatgcgaaagccaaagccgacgcagcgaaacaagcgatcgacaacgcgacaacaaacgatgcagtaactcaagctaaaaacgctggggcaacatcagtagattcggtgactccaacgccggtagtcaaaccagctgcaaaacaagcaattgatgacgcattgaaagctaagaacgacgcgattgatgccaacaatgacttaacagacgaagaaaaaactgcggcgaaagctgatgcaaaagccaaatctgacgcagcgaagcaagcaatcgacaaggcgacaacaaatgatgcagtaacgcaagctaaaaacgacggagcaacatcagtagattcggtgactccaactccggtagccaaaccagcagctaagaaagccatcgatgacgcattgaaagctaagaacgacgcgattgatgccaacaatgacttaacagacgaagaaaaaactgcggcgaaagctgatgcaaaagccaaatctgacgcagcgaagcaagcaatcgacaaggcgacaacaaatgatgcagtaacgcaagctaaaaacgacggagcaacatcagtagattcggtgactccaactccggtagccaaaccagcagctaagaaagccatcgatgacgcattgaaagctaagaacgacgcaattgatgccaacaacgatttgactgctgaagaaaaagccaaagctaaggaagacgcgaaagtcaaagccgatgcagcgaagactgcaatcgacaaggcgacaacaaatgcagcggtggaacaagctaaggctgatggagcgacaagtgtatctttagtaacaccaacagcgcaagcgaagccagctgcaaaacaagccatcgatgaagcattaaaagcaaaagaagcagcaatagatgccaacaatgacttaacagcagaagaaaaaacaaaagctaaagaagatgcgaaagccaaagcagacgcagcaaaacaagcaattgatcaagcaacaacaaatgcatcggtagaacaagctaaaaatgatggaacaacagaagtaaacaatgtgaatccaacagcgcaagcgaagccagcggctaaaaaagcgatcgatgacgcgttagttgataagattaaagaaatcgaagcaaataacaacttaacagacgaagaaaaagccgcagctaagcaagaagcgcaagccaaagcagacgcagcgaaacaagcaatcgacaacgcaacaacaaacgatgcagttgagaaagctaaaaacgatggagtgacaagtgtatcttcagtaagtccaacagcgcaagctaagccagcggctaaacaagcaatcgacgatgcattaaaagctaaggaagcagcaattgacgcaaacaacgacttaacagacgaagagaaaactgcagcgaaagctgatgcgaaagcaaaagcagacgcagctaagcaagccatcgacaacgcaacaacaaacgatgcagttgagaaagctaaaaacgacggagtgacaagtgtatcttcagtaagtccaacagcgcaagctaagccagcggctaaacaagcaatcgacgatgcattaaaagctaaggaagcagcaattgacgcaaacaacgacttaacagacgaagagaaaactgcagcgaaagctgatgcgaaagccaaagccgacgcagcgaagactgcaattgacaatgcaaccacaaacgataccgtaacgcaagctaaaaacgacggagcgacaagtgtatcatcagtcactccaacaccaacagctaaaccggctgctaagaaggccatcgaagatgcgctgaaagctaaggaagcagcaatcaacgcaaataatgacttaacagacgaagaaaaagccaaagctaagcaagaagcgcaagacaaggcagctgcagcgaaacaagcgatcgataatgcgacaacaaacgcgggagtagaccaagctaaggctaatggaacaacagaagtaaataatgtaaatccaacagcagtggcaaaaccagcagctaaaaaagcaatcgacgatgccctaaaagctaaaaatgacgcgattgatgctcgagataatctgacagctgaggaaaaaatagcagctaaggaagaagctaaagccaaagccgacgcagcgaagactgcaatcgacaacgcaaccacaaacgatgcagtaactcaagctaaaaatgatggggcagcaagtgtatcttcagtgactccaactccagtagccaaaccagcagcgaagaaagcaattgatgatgcgctaaaagctaagaacgacgcaatcgacgcaaataacgacttaacagatgaagagaaaacagcagcgaaagctgatgcgaaagcaaaagccgacgcagcgaaaacagcgattgacaacgcgacaacaaatgatgcagtagaaaaagctaaaaatgatggagcaacatcggtagattcggtgactccaactccagtagcgaaaccagaggcgaagaaagcagtagaagatgcacttaaagccaaagaagcagaaatcgatgctcgagatgatctgacagctgaggaaaaaacagcagctaaagaagaagcgaaagccaaagcagacgcagcgaagactgcaatcgacaatgcgacaacaaataatgcagtaactcaagctaaaaacgctggagcaacgagtgtatcttcagtaaatccaacagcgcaagctaagccagcagctaagaaagcaatagacgatgcgcttaaagctaagaacgatgcaatcgatgtgaacaataatttaacagctgaagaaaaaacagcagcgaaagctgatgcgaaggcaaaagccgacgcagcaaaacaagcaattgacaacgcgacaacaaatgctgacgttgagaatgcaaaaactactggagtggcagatgtaaactcattgaatccagtagcggttaagaaaccagaggcgaaaaaagcagtagaagaagctcttaaagcaaaagaaacagagattgatgcgaacaatgacttaacagcagaagaaaaactagcagctaaggaagaagctaaggcaaaagcagatgcagctaagaaagcaatcgatggagctgatacagatattaaggttgatgtaaatagtatatctggtttaagtgatgtaaattcatttagtccagaaccagttaagaaatcagaagctaaaaaagctgtagatgaagcactaaaggcaaaagaagcagaaattgatgcgaataatgacttaacagcagaagaaaaattagcagctaaggaggaagctaaagctaaagccgatgcagctaagaaagcaatcgatgaagctgatacagatattaaggttgatgtaaatagtatatctggtttaagtgatgtaaattcatttagtccagaaccagttaagaaatcagaggctaaaaaagcaattgatgcagctctagagaagaaaatagaagaaatcgatgctcgagatgatttaacaactgaagagaaaactgcagcaaaagctgaagtagaaaataaagctaatgaggcaaaagacgcaatcgatgcagcagatacagacattaaagtagatgtaaatagtgtatctggtttaagtgatgtgaactcgtttagtccagaagcagctaaaaaaccagcagccaaacaggcaatagatgatgcattaaaagcaaaagaagatgcaatagatgcgaatgatgatttaacagctgaagaaaaaactaaagccaaagcagaagctaaggcaaaagctgatgcagcgaaagaagcaatcgacaatgcgacaacaaacgcagaagtggaacaagctaagactgcaggaacggcatcagtagcttcagtgactccaaagccagtggcaaaaccgactgcgaagcaagccatcgacgacgcgcttaaagctaagaacgacgtgattgactctcgtacagacttgacagatgaagagaaagctgcggctaagtcagaagcaaaagctaaggccaacgcagcaaaagcagccatcgataatgcaacaacaaatgcggaagtagaccgagctaaggtgactggaataacagaagtaaaagcagtagatccacaaccagaagcgaagccagaagctaagaaagccatcgatgataccttaaaagctaagactgatgaaatagactctcgtacagacttgacagatgaagagaaagctgcggcgaaagcagacgctaaagcgaaagctgatgcagcgaagactgcaatcgacaacgcaacaacaaacgatgcagtaactcaagctaaaaacgatggggcagcaagtgtagcttcagtaaatccaacagcgcaagcgaagccagcggcaaaacaagctatcgatgatgcattgaaagctaagaccgacgcaattgatgccaataacgatttaacagcagaagaaaaagccaaagctaaggaagacgcaaaagcgaaagctgacgcagctaagcaagccatcgacaacgcaacaacaaacgatgtagtaactcaagctaaaaacgatggggcagcaagtatagcttcagtaaatccaacagcgcaagcgaagccagcggcaaaacaagctatcgatgatgcattgaaagctaagaccgacgcaattgatgccaataacgatttaacagcagaagaaaaagccaaagctaaggaagacgcaaaagcgaaagctgacgcagctaagcaagccatcgacaacgcaacaacaaacgatgtagtaactcaagctaaaaacgatggggcagcaagtgtagcttcagttactccagcagcagtagtgaagacagcagctaagcaatccatcgacgaagctctgaaagctaagaatgatgaaatcgacgctcgtacagacctaacagatgaagagaaagctgctgctaagtcagaagcaaaagctaaggctgacgcagtgaaagcaaccatcgacaacgcaacaacaaatgcagaagtagaacaagctaaggtgactggaacaacagaagtcacttcagtcaatccagaggcgttgactaagtcagcagctaagcaatccatcgacgaagctttgaaagctaagactgatgagatagacgctcgtacagacttgacagatgaggagaaaactgcagctaagggagacgcgaaaacaaaagctgacgcagcgaagactgcaatcgacaacgcaacaacaaacgatgcagtaactcaagttaaaaacgatggggcagcaagtgtagcttcagtgactccagcagcagtagcgaagacggaagctaagcaagccatcgatgaagctcttaaagctaagagtgctgagatagacgcacgtacagacttaacagacgaagagaaaactgtggctaaattagatgcaaaagccaaagctgacgcagcgaaagcaaccatcgacaacgcaataacaaatgcggaggtagaacaagctaaggtgactggaataacagaagtaaaagcagtagatccacaaccagaagctaagacagcagctaagcaagccatcgatgatgccctaaaagctaagaacgacgagatagacgctcgtacagatttaacagacgaagagaaaactgctgctaagtcagaagcaaaagctaaggccgacgcagcaaaagaagttatcgataaagcgacaaccaatgcagaagttgaccaagcaaagtcaactggaattgcagaagtcacttcagtaaatccaggtgcagtggctaagacagaagctaagcaagccatcgacgaagctctgaaggctaagaacgacgaaatcgacgcacgtacagacttaacagatgaagagaaagctgctgctaagtcagaagcaaaagctaaggctgacgcagcaaaagaagccatcgacaaagcaacaacgaatgcagcagtcgaccaagctaaaactaacggaactttagaagtcacttcagtaaatccagaagcagtagcgaagacagaagctaagcaagccatcgacgatgctttgaaagctaagactgccgaaattgatgctcgtacagacttaacagatgaagagaaaactgcagccaaagcagatgcaaaagccaaagctgacgcagcaaaatcagccatagataaagcaacaacgaatgcagaagtctaccaatctaagtcaactggaatcacagcagtgacttcagtaaacccagaggcagtagcgaagacagaagctaagcaagccatcgacgaagcgcttaaatctaagactgatgaaatcgactctcgtacagacttaacagacgaagagaaaaccgcggctaaagcagaagtaaaagataaggctgacgcagcaaaatcagccatagataaagcaacaaagaatgcagaagtcgaccaatctaaggcaactggaatcacagcagtgacttcagtaaacccagaggcagtagcgaagacggaagctaagcaatccatcgacgaagcgcttaaagctaagacttccgagatagactctcgcacagacttaacagaagaagagaaaattggggctaaggcagaagcaaaaacaaaagctgacgcagcgaagactgcaatcgacaacgcaacaacaaatgcggaagtagaacaagctaaggtgactggaacaagagaagtaaataatgtaaatccagacgcagtagcaaagtcagaagctaagaaatccatcgacgaagttcttaaagctaagactgccgagatagacggacgtacagacttaacagatgaagagaaaactgcagccaaagcagacgcgaaagctaaagctgacgcagcgaaagcagccatcgacaaagcaacaacgaatgcaacagtcgaccaagctaagtcaactggtattgaggaagtgaactcagtcaatccgattgcacaaattagaccggcagttggagcaagtgctggagttcatgtaaactcagctaatccaacttctaaagaaaaaccacaggaaaaacaagcaatagaccaagtattgaaaactgatgaagccaaagctaaagtgaaagatagtgtagcatctactatctcacaacttgaaaatgagaatcagcaagtagctactaatcagcgtgtagtggctagagaattgccaaatacaggtacaacagaatccataacagcaattgttgcagcaacagctagtgcgatacttggttttggtcttattgctcgtcgtcgaaaagaagatgaagaagacaaattagaaaatcagtaacgatttctaacagttgcaactccttttttgagactaagtagataatattattcttaaaactctcctagagcaaaatagctactaggagagttttttctctaatcagaagatacgtgacgggactaaaaacaatctcatctgctttgcggatgagggttttcttattttgtgctatacttaagatatgcatagaaaaacagtgattgattttagggctttgggcgagagatacacctttacccagcctattaaagagttgaaaacgagaaatgtagcagaagtggcagatttgctggtacaagtggaaagctaccaagagcaaggctactatgtggtgggctatgtcagctacgaggctgcacctgcttttgaggagaaattagcagttcataaagctcctttactggacgagtatttgctttactttactgttcacgatagggtggagacatctcctattcccctgacttatgatgaggttgatttgccttcaaattggcaggaagtgacgtctgaagcagattatgaaaaggcgattgctcagattcaccatcatttgcggcagggggacacctatcaggtcaactacaccgtccaactcaagcaaaaattaagtgccaatccttttgccatctacaatcgtatggtagtagagcaggaggcgggctacaatgcttatgttgaacatgacgagatggcagtgatttccatgagtccagaactcttttttgagcaaaatgaccgcgagttgacaacacgaccaatgaagggaacgactcagcgtggggtaactgaccaagaagatcttgaacaggccagttggttggagcaggattctaaaaatcgctctgaaaatatgatgattgtggacctcttgcgcaatgacatgaaccgtatttctgaggtggggagtgagcatgtagagcgtctttgccaagtggaacagtattcaacggtttggcagatgacttcgaccatcaagagttggttgcgagaggatgttgaccttgtagagatattccgttctctatttccttgtggttccataacgggagctccgaaaattgcgactatggaaatcatcaaggacttggagccacaaccgcgcggagtctactgtggaacgattggtctcctgcttccaaatggacgacgaattttcaatgttgctattcggaccattcaactgcatcaagggaaagccatctatggagttggcggaggcattacatgggatagcacttgggagtctgaataccgtgaggttcatcaaaaggcggcagttctttatcgtaaacaagctcgtttcaaactgattactacagggaaaatcagccagaagaacttgctgtttgaagaacaacatatagaaaggctgagaaaagctagtcggtattttgcctttccatttgattcagaaaacttgaaacaaaagatagaggaagagtgtcaggcttgtgatgctaatcaagattaccgcttgcatatttctctcgacaagtctggagagatagaagtagatcgtcaagtattaacagctcttagtccaagtttttgtcaggccaaactttgccttcaggaagccaatttgcaacaagcctttatctacttcaaaacgactcaccgaccgcatttgagcataggggagcaagagatcatttaccataataagtctggagaacttcttgaaacctctatcggaaatttggttctaaaaatcgatgggaaactctacacaccgcctatccgacttggaatcttgtcaggaatttatcgtcaacatttgctggaaacaggacaggtagaagagaaaatcttaaccttggcagatttagtccaagcagaagctatttacggttgtaatgcagtgagaggcttgtatgcgttaagccttgaggagaactagatgaaactgatatttttacacgggttagggcagtcagcagagagttggaaagaagttcggaatctactgacagattatccttctgaggctattgagttatttccttctggagttagcaactatcaacaagctaaagagcgagtttatcagcatctagctcaagagacagaaccttttattttggttggattatccttaggtgctgctctggcactagaactttccagttacgatttaccaaatttccgagctttggttctatcaggatgcccacttaaattgtccggtaatatccttttttacattcagttgctgatttttaaactacttcccaaaagggtatttgaaaaacagggagcagacaaagctcttatggtcggagtttctgaggaattgaagacacttgatttaacggatatatcaagaacttgtccttatccaaccttactaatttgtggcagcaaagataaaccgaatcttagttctatgagaagtcttcataaactaatatcagaatctcaatttcagattataccagatggacctcatgtcttgaataaggctaaaccaaaggagtttgtagaaaagatcagaagtttccttgaattgctgaaataagtttgataaaataatagtgaaatcgataacatcatcataggagaaagaaatgaataaacgtttatttttaaaaatgagtctggctaccttgccagttttagccttgttttcacaacctgtgttagcagaagaaaacattcatttttctagttgtaaagaagcttgggcgaatggatacgcagatattcacgagggagaacctggttattctgccaagttagaccgcgatcatgatggtgtggcttgcgaattgaaaaatgctcctaagggtgcttttaaagcaaaacaagcggctacaactcaaactgatacaacttcatccacagcaagtggttgggttaagcaggacggttcttggtactattttgatggaaatggaaatccagtgaaaaatgcatggcagggaagctattacctgaaagctgatggtaaaatggcacagagtgaatggatttatgactcttcttatcaagcttggtattatttgaaatcagatggttcttatgctcgcaatgcatggcaaggaaactactatttgaaatcagatggtaaaatggctaaaaatgagcgagttgatggaggccgctactatgtagatgcttcaggtctatggaaaccataagtaaggataaaatctagaaagttaatgcaaacctttgcataaatgagtgaattttgttatactagtactgtaagcattttcaattaattcataattaaaaaggagaatatgatgagtcaaaagattattgggattgaccttggtggaacttctatcaaatttgcaattttaactcaagagggagaaatccaagaaaaatggtctatcaagacaaatattttggatgaaggaagccacattgtagatgatatgattgagtctattcagcatcgtttggacttgcttggattggcagcagtggacttccaaggaattgggatgggatcaccaggtgtggttgaccgtgaaaaagggactgttatcggtgcctacaacctcaactggaaaactcttcaaccaattaaagaaaaaattgaaaaagccttgggcattccattcttcatcgataatgatgccaacgtggcagctcttggtgagcgctggatgggtgctggtgataaccaaccagatgttgtctttatgacactcggaactggtgttggtggcggtatcgttgcagaaggtaaattgcttcacggtgttgctggtgcagcaggtgagcttggccacatcactgttgactttgaccaaccaatcgcatgtacctgcggtaagaaaggttgccttgagacagttgcttcagcaacaggaattgtcaacttgactcgtcgttatgccgatgaatacgaaggcgatgcagccttgaaacgtttgattgataacggagaagaagtaactgctaagactgtctttgatttggcaaaagaaggagacgaccttgctttgatcgtttaccgtaacttctcacgttacttgggaatcgcttgtgctaacattggctcaatcctaaacccatcaacaatcgtcatcggtggtggtgtgtcagctgcaggagaattccttctacaaggtgttcaaaaagtctacgatgaaaataccttcccacaagtacgcacatcaacaaaattggctcttgcaactctaggaaatgacgctggagttatcggggcagcatcacttgtattgcagtaaaataataaaaggagaaaaacactactttaaatcgagtgattttcctcctttctttttttatgctatactagttaggacaataaatgaggtgagagtaaatgacaaaagcagatacgatttttaaagagaatattgaacgaatcctcaaagacggtgtcttttctgagcaggcccgtcctaagtataaggatggaaccgttgccaactccaagtatatgactggtgcctttgccgagtatgacttgtccaagggagaatttcccatcacaaccttgcgtcctatcgctattaaatccgccatcaaggaagtgctctggatttaccaagaccagtctaatagcctagaagttctcaatgacaagtacaatgttcactactggaatgactgggaagtgggagatacaggaaccattggtgagcgctatggtgccgttgttaagaaacacgatattatcaataagcttctcaaacagttggaagccaacccttggaaccgccgaaacatcatctccctttgggattaccaagcttttgaggagacagagggcctccttccatgtgcctttcagaccatgtttgatgtccgccgtgtagatggggaaatctatctggatgcgaccttgacccagcgttcgaatgacatgttggtggcccaccacatcaatgctatgcagtacgtggctcttcaaatgatgattgccaagcatttcggctggaaggttgggaagttcttctacttcatcaacaatctccatatctatgacaatcaatttgaacaagctcaggaattgctccgtcgtgagccatcaaactgccaaccacgtttggtcttgaatgtgccagataagaccaatttttttgatattaaagcagaggactttgagttggtggattatgaccctgtcaagccacagttgaagtttgacctagctatttaaaagaatagaaaaaagaagttgagaaaataaatcccaacttcttttgtttcttaacgtgatacgcggcgacgagctgcttttttacggttttcttcgatgaaagctgctttttgctcttctggttcgatcactttctttttaaatgcgtatactgcacctgcgactgcagcgacagttcctgcgacacctgttacaagacctttagcgaatcctttagccatgagtcttcctcctttatcttcttaatcagccagccccctcaagaggtcacatttttctgactgacctttttgtgttataataatagtaacgaaaaaatgggaatttttcaaggaaaaaagatgaaaacaaaaataattgtgattgttggaccgactgcagttggaaaaacagcccttgccatcgaagttgcaaagcgttttaatggcgaagtggttagtggagatagccagcaagtctatcgaggtctggatatagggacggctaaggctagtccagaagagcaggcagctgttcctcatcatttaatcgatgttagagaggtaaccgagtcttactcggcttttgattttgtttcagaagctaagaaggctattgaggatattcaaagccgtggcaagctagctattattgctggtgggactgggctttatatccagagcttgcttgaaggctaccacctaggtggtgagactcctcatgaggagattttagcttatcgagctagtttggagccatattcagatgaggaattagcccatttggtggagcaagcagaccttgagattccccagtttaatcgtcgtcgtgcgatgcgtgccttggaaattgcccattttggtcaggatttggaaaataaagagagtctatatgaaccgctgattatctgcttggacgatgagcgcagtcagctttatgagcgtatcaatcgccgagtagatctaatgtttgaggctgggcttttggatgaggctaagtggctctttgcccattatccagatgtgcaggcagccaagggcattggttacaaggaactctttccttacttccgtggagagcagaccttggaggatgctagtgagagtctcaaacaggcgactcgtcgttttgccaaacgtcagttgacctggttccgtaatcgcatgcaggtcaccttttatcaaatcggagaatctggtgtgcaagaccgtatttttagccagatagaggagtttttagatgattgaaacggagaaaaaagaggagcgggtcctgctcattggtgtggaattgcagggcatggacaattttgacctctccatggaagaattggccagtttagcgaaaacggctggggcagtcgttgtagatagttacagacaaaaacgtgaaaaatatgattccaagaccttcgtcggctctggtaagttggaagagattgcgcttatggtggatgcagaagaaatcaccactgtcatcgtcaacaaccgtctgacgccaaggcaaaatgtcaatctagaggaagttctgggtgttaaggtcattgaccgtatgcagttgattttggatatctttgccatgcgagctcggagccatgaagggaagctccaagtccacctagcccagctcaaatatctcctgcctcgcttggttggtcaggggattatgctcagccgtcaggcagggggaattggttcccgtggacctggtgaaagccagttggagttgaaccgtcgtagtgttcgcaaccaaatcacggatatcgagcgccagctcaaggtggttgagaaaaatcgggcgactgtcagagaaaaacgtttggagtcaagcacctttaagattggtttgattggttacaccaatgctgggaaatcaaccatcatgaacactttgaccagtaagacacagtatgaagcagacgagctctttgcgactttggacgcgacaactaagagtatccatctgggaggcaatctccaagtaactttgacagatacagttggctttatccaagatttgccgacagagttggtgtccagtttcaagtcaaccttggaagaaagcaagcatgtggaccttctggttcatgttatcgataccagcaatccttaccatgaggagcatgaaaaaacagtcctgtccatcatgaaagacctggacatggaagatattcctcgcttgaccctttataataaagcggatttggtggaggattttacgccgacccaaacgccttataccctcatttctgccaagtctgaggatagtcgtgagaacttgcagacactatttttagagaaaatcaaggatatttttgaatcttttaccctgcgcgtgcctttttctaagtcctacaagattcatgatttagaaagtgttgcgattcttgaagaacgtgattatcaggaagacggcgaagtgattacaggctacatttccgagaaaaataaatggaggttagaggaattttatgactgatattaaaaccttggctctaaaatatgggggctatacaagtctggataaggtctatctggatcaacttctagctggtaaaacagagcaagagcagttggcactgatcactcctccgcctagcgtggtcaatgcttattttgcagaactctaccagaaaaaaagtcctgaggctgcgacggattattttgcggaactcagtcaggaactgaatctttacaatactgagccaagtttcaccctagaaaataagccttttattcggcttaatctgtcgggtaaatcctttggtttttgttatgagagtgagggtctgggtcggattttctctgaaaatgaagagaagatttcggatgacttgctttttgaaattgcgcaaattttcccccatcaactggtctttgaagagtctggtaagatttacatgaaggctgttgtagatgaggaagttgttagcatggagagtctcacagctttgactgatttggaaagcttggctgatggtcgtaaacgtctcaaagcctacagtcaagaggatttattgcaagaagctagagcttttactggcaagcgctatttccgatcggaaaaccgcacagccatgttatatattgattaattagaaagtatcgaatggatattcaatttttaggaacgggggcaggtcagccctctaaagcccgcaatgtttccagtctcgccctgaaactcttggacgagattaacgaagtctggctctttgactgtggagaaggtacgcaaaatcgcattctggaaaccacaattcgaccacgtaaggtcagcaaaatctttattacccacctacatggagaccacatctttggcttgccaggtttcctttctagccgtgcctttcaggccaatgaagagcagacagatttggaaatctatggacctcagggaatcaagtcatttgtcttaaccagccttcgtgtgtcaggttctcgtctgccctaccgcattcatttccatgagtttgaccaagattcccttgggaaaatccttgagaccgataaattcactgtgcatgcagaggagttggaccacactattttctgcgttggctatcgtgtcatgcaaaaggacttggaaggaactttagatgctgaaaagctcaaggcagctggagtcccatttggcccactttttgggaaaatcaagaacgggcaggatgttgttttggaagatggaactgaaatcaaggcagcagactatatctcagctccacgtccaggtaagattatcaccattctgggtgacacccgaaaaaccaatgctagtgtgcgtctggctgtcaatgccgatgtccttgtccatgaatcgacttatggcaagggtgatgaaaaaattgctcgtaaccatggccactctactaacatgcaagctgcacaagtagcggtagaagcaggtgccaaacgcctcttgcttaaccatatcagtgcccgtttcctctcaaaagatatcagcaagctcaagaaagatgctgctagcatttttgaaaatgtccatgtggtcaaagacttggaggaagtggaaatctagcagtcacagaaaggataagtatgcctactattctcattactggagctagcggtggcctggcccaagaaatggttaaacttctgccaaatgaccaactcatcttgcttggtagaaataaggaaaaattagcccaactctacggaaatcatccccatgcagaattgatggaaatcgatattaccgatgactcagccttagaatctctggtaactgacctctatctccgttatggcaagattgatgtcttaattaacaatgctggttacgggatttttgaggaatttgaccagatttccgaccaagatattcatcagatgttcgaggtcaatacctttgccctaatgaatctgtctcgtcgccttgcggctcgaatgaaggaaagtcaaaaaggccatatcatcaatattgttagtatggcaggtttgatcgctactggcaagtctagtctctactcagccactaagtttgcggccattggtttttcaaatgctctgcgcctcgaactcatgccctatggagtctatgtgacaacagtcaatccaggaccaatccgaacaggattttttgaccaagcggacccagatgggacttatcttaagtcggttgaccgtttcttgttagaaccagatacagtggctaaaaagattgtcaagattataggaaaaaacaaacgagaactcaacctcccgattttgttgaacctagcccataagttttatactctctttcccaagctagcagataagttggcaggggaaacttttaattataagtaaaaagaaccaatgtgcaggttgttgctagcctacatattggttcttattatttttcaactatcaaactggacttcttctagtagatagtcgataaagcgttcgcccatcttagagaggcttgttttttcatgctggatatagaccagctcaatggggtcatcaatgtccagtgggatagaaacgatattgtctccgttgaggttgctgttcaaaattcctgtcgcaatggtataaccgtccaaaccaatcaagagattaaagagggtggcacggtcactgactacgatagattttttgtggtattcctgcgagagaatctcttctgaaaagtagaaggagttatgagttccttgatcatagctgaggtaagggaagttctccaaatcagatagtttgaccttgtctttctttgccagaggattggtcttgctgacaaagatatgcggttgcgcggtaaagagatggtgagccagcaggtggttgtcatccagcattttcgttaaaacatcacggttgtagctgttaaaaaataggacaccgacctcactacggaagttcttgacgtcgtcgataatctcccaagtacgagtttcacgaaggaagagctcgtatttctccatatcacttttcttgagtagagaaacaaaggcattgactacaaaggcatagtgctgggaggaaacgctaaagagttcgcggtgggcgacaggatttttatagcgttcttccaaaagctgggtctgctcgacaacctgacgggcataagagaggaactccatcccatcacgggtcaaggtgatgcccttggggttgcggataaagatctcaatgcccatttcattttccaaatctctcacagcgttggaaagactcggttgagtgataaagagttgcttagctgcctcattcatggagccagtttcgacgattttgataatatagtgtaattgttgaattctcatgtttttattgtaccacacttgcgtcagaatcgccaaagaagataggaaaatcagggggagtgtgtgagtctctgtaaagtagttaagaagaaatttttaaaccatttagtaaataagattaaaaattttactcgaaaataagaaatttgcacgatttactcattacttatccaatactagagtttatactagttactgtaaagatgatcatctaaaagaaggaagtaaccttatggctaaaaatacaagtcgtccagagattgattctctaagtttcgaggttgaaaaccaagaacttttcgggaaattacaagctagtggtacacagcttttaaaatgacactagcaggccgctgtggattgtgtttcacctgtttctatgagtgtacgacaaataatgttcgctgttagataaaacaaaaggaaaattctagtgttttattacaaaacattgacaacattttgatttggtgttatatttacggggagaaatacaaataaaacaagacaactttgagattgattctttggattatggaaattaatagccaagaattagatggtaaatccgctgctgtgtggcgtacggctgttagattaacagcacaggggcgctgtggttggtgatttacatattcttatgaatgtatttcgccaaacgtgcgctgtggataaaactctctattttttgacaggaggataaaatggaaggaattattggaacactagaattctatgcacctgtactggccttaggagttgttgtcatagggattgtttactttatgaaaaaaagaaacgatcgcaaataatcaacatcgaccgatacctgaaaaaggcatcggtttttttattacttgaatatattgcacaaaatactcatgccaaacattgaaaggaaccgtataatgagagagtaataaagaaacggaggaatgaaatgatgaaacagcttattgtgacaggattaacgaaaacatttggtcaaggggataatatcgttcatgctttatcagatgtgaacttgtccgttgaaaaaggtgaatttctggcaattatgggggccagtggtagtggaaaaacaacactcctcaattgtatttcaacgattgataaaccaacatcaggtgagattcgatttgaagattttgacatcatccatgccaaggaaaatgaactagctgactatcgtgctaaaaacatttcctatattttccaagcctacaacttggtggaaaccttgacggtctatgaaaatatcgttctacctcttcaaattcaggggaaaaatatcaaaaaacatcaggataagattgaggaaattttggataagttggccatccaaaacttaaaagataagtttcctaatcagttatcaggtggtcagcgacaacgtgtggcaactgctagagccttgattgatgattctaaactgattatcgcagatgagccgacaggagccttggactctgccaattctgaaaaactgatggcgcttttgcaggaaatcaataaaagttttggtattaccattttattggttacgcatgcccctgctgcagccaagtactcttcacggatggtgctacttagcgatggaaagattatggatgatttggaacgtaacagcttatctaatgaacagtatttgcaagagatttacagccgtaccagataggagggggagagtatgtatccaaaattgattttacgaaatgtatttcgaaatttacagacctataccatctattttttcagtctgaccttgatttatagcttgctctacgcttttaatgctttaccaagccatccagtgatgcaaagtttatcaggagcaaaggaaatgttgacgacggtgatgagtcagtacatgggcttgctttcctatctgattctatcggcgattgcctttctcgtcgtttattccacaaactttgtcctgggacggcgtaagaaagagctgggactttatgcaacgctgggaatgaagaagaagcagattatcggtaccctgttctttgaaaccatgctggtcaatatcttttccttgattctaggtttcttgcttggattgattttactggtcattctagctaagattgcatctgagtttttcatggccaattactttggtagtctgcttttctttgatagcaagtctgtcatcttactagtttattcctatttggtaaccagttttattgtaggtgtcatggacattcttgcctttagaaagcaaaatatcattgcacttattcaagaaaatggggtcaaaaaatctgtcttggcaaaaggcaagccagttctccaagtacttctctttattctttcgacagctgttatcggctttggtgctctctatttttcagactatcatcatctatcattcttgaaaagctggggtatcttgctggtatctatcttcgtgatttttgtgattttattttacaataccttgagccattttatcttggtctcccttagaaaactgcctcaaacctactataacaaactaaacacttttaaaatccgtcaattttcaaaacaagctgatagtaattcggtcacgttggctgtcttatccttgaccttgacactggctctcagcttactcgtttttagtggtagtgcctatacgactatgaaccgagagctgaacaaatactcaccttatgatgtaactgtcaatctctaccgtggtaaagagtttcaattttctcaggaatctgtcaaagacagattgaaagccgatggctttgactttaacctcatcaaagaggagtacagctgccctatctattctagtgatttaacttataaagatttgattgataccagcaatctctgggagcatgataagaaacttcctgaatcaaaagtaccgattttaggaatttctgcctacaatcatctccgcaaactgcaagggaaaaaagcgattgacttggcagaagaccaatttctagtcaatgccaattataaaggaactgccaagcagatccaggactttctatcaacgaccaaaaccttcatgattaacggtcattctctcaaccttgcctcttcaaagccacttgaaacagtttactttttatcttcagtaactacaaatgactcaggaaccttgattgtaccagataaggtagtagttggattgacggaagaccacacgacctatgttgccaatttcaaggaaaatatagacaaacgggaagtagaaacattcttgagtcagtggattgaaaaatactacttcactcgtgatggagcagagttgaattcgttcacctatcaaaccaaaggaagtattttcgaggtttaccttggatttatgggcgtcattgtctttgtcatgatttttgtcagtgttatttttatcattatttccctcagtatcttgtcccttcaaacttcaacaagtgctttggatagtgtaaatgattatcaaatcttataccttcttggaaataagaggaagcaaaatcgtactattcttttgcaacagattctaagttatttcttggttccgctggtcatcgcaggtccgctagcatttgccttgagtaccgctcttttgggctattttgagaacttcgctaataccagcatttctattgatatcacctatctgggagtagcggttttactctttgtcctttacttgctagtgacttacagagtaagttggcaaattattgaaaattaagtcaaataccagagttgccaatccgacaattctggtattgtgttataatgatattaaagtagttcaggaagtggatacatatgaaacagtttgtcaaatcgctctcgaaaaactcacttttattgtggtggttgacgatttttaatcatctagctttaatgatttatatttattataggattcctctggacttttcgacagatttttccttgcagatggttttattgctgattattgctttaattgtatttagctatatttgtaatattgtgacctttcggtatagtgagttgaaactttggttgctcctgatgatgtttctcattagctggcaatccatatttaatcaaggagttgcgagcaccctgttgcacttttttgatattcttcatcctctcaactcttttttattggtgtatagttctctgtctattatctttctgggagagaaaataggagaagaactgttgagtgtgtcctttgtgttgacactaatcaccattagttcgtatctgttaagtccttcaatttttttatttctgtccttgtttgcgtctttctttttaaaccttgttcccttgattttactgattttatatcataaagagttgaaaagtaaactcaagtatcagagacgaaatttgtggatattagctttgatattgcctctttcttatttctttttgtatatcaatacgaggggctcaggagtgatgaacctagtctggtatctagaaattcttggtatcttagcttttttacacttcaaaacgattgtcagctctcttcaaaaaagggtatcagagttgaaattgtcctatataaaagctttttcacgcttgtttttactgcttatgtttttgttagtaggcattttcatcatctttcgtctagacttaaacacgagctttttggtattgaatatcatgttactattgttcgggatttgttcggaagaattgattcgcctttttcgttctgctgaaatgctagatgctagggattatgtaaaagttctctttttaaagcgtaaccgcatggtgaaaagtctgctggcaaatgaagacacagaacaacagttctcggaatttcttcacaatgaaatcctgcaaaatgtgatggcgataaaaaatttcaataaatatagtatcaatcgggcttttggtgaacagatcaatctggtgacagaggagttggttcagcggattcgtgagcggatggattattatcagccaatggtagaaacagacgagcagttagacatacagtatcaagggctgattaatcggattgtcaagcgctatcacgcagaaaatgaagtcgtcacacagtttcctgtccactttaggcttttatctccttacgataaaattacctatcgtctggttgaggaattggcgaccaatgccgttaagtacgctagtggtggaaggatttctttgaagattgatatgcatgatgacgctctttttatcatttctgaaaatgactgccttcaaacagaaaaatccttaggttatggcttgaaaaatatgtctaataaaattagtgttttaggtggtcaaatgcagatttttgaaaataacaagagatttcgtgtagaaattactctcccgattgataaggagttgtgttatgaaaattttgttaattgatgatcataaattatttagccaaagtatcaagatgattttagagttatcggaaaacattaaaaaggtccagttagtggataatttttcgactatttcggagattgcttttaatgactacgacattattttgattgacatcaacctgacgagtctgtatcaagctgatgggctgaccttggcacaagagattattgacaatggttgttctagtaaggttgtgattttgacgggatacagcaaaaagatgtatgaacaccgagctaaagctatgggggcttatggatttctagataaaagtatggatccagatgagttggtgaaaaaactggaaaagatttatctaggaggtaagatcttttcagatgaagtgatggtagaggtgctaacaccacgagaaatcgagatactagaactggttagaaatggcttgactattgatgatgtctgtgacaaggtctatgtgagtaaacgtacagtttccaatcacctggccaatatcttttcaaaattaggagtggctaacaggcaggaggcgattcatatcgctgagcagttgggctattttccaccagattaaaaagttgcagaagatgcagcttttttaatttctgcgatacttcttgtgtggtctcttcttgaaaaaaacacaaaattttgctagaatgagtcttatgaaaacattctatgatgtgcagcaattcctcaaacgatttggtattattgtttacatgggaaaacgcttatatgatattgaactgatgaagttggaactctctcggatttacgatgcagggttgatggacaaattagactatctagaggcagaagcggttctacgcagagagcacaaggtagaattggattatattgagaaaaatggagaaaagaactaatggttacttggattttgtgggcacttatactggcaatgttggcatggatgggctttaactatcttcgtattcgccgtgcggctaaaattgtggacaatgaggaatttgaagccttgattcgtacaggtcaattgattgatttgcgtgatccagcagaattccacagaaaacatatccttggtgcccgcaatattccttcaagtcagttgaagactagtcttgcagccctgcgtaaagacaaacctgtccttctctacgaaaaccaacgtgcgcaacgagttacaaatgcagctctttacttgaaaaaacaaggcttttctgagatttatatcctttcttatggcttggattcttggaaagggaaagtgaagactagctaatcttatttccaaattagtcgaatgataggatgaagctattgttttatagtataattaatttgtataaaatttaaggagttcttagaacatgaaagaaaagaagaaaaatccactttttgtgggcatcttgtcgattattcttggtttgttatttccgttgggaggtattggtttaggtattaccagtttattgtatgctaactcacttcaaaaagaatctggactagactataaaacagaaaaaattatagctattgtagggattgtagtttccgtaattaattgggttttaggattgattctttttatgaattaagtagtgtaaaacaaaaaagctttatttgaaagcttttttgttttatccacttttctctaagtagtttttaatgattttcaattcctcttggttcaagggacggtattgaccttctgctagttctgggtctaatgtaaactcaccgaactgaattcgtttgagtgaggtcaccttgacaccaaccgagagaaacattttcttaacctgatgaaattttccttctgaaatggtgatagaagcttgactgagggaaggacttgcagatagaatctctagtcttgcaggtttacagacagtgccatctaaaaagacaattcccttttgaaaggcttggatatggtcaggtgtcagaagtccattaacctcaacctgataagttttatcgacatgatattggggatggaggagctgaaagcccaaaggaccgttatcagtcaagaggaggagtcctgtcgtatctcggtccagtcggccgacggcatagagcatgtcagactggatgtcaggcggaaggaggtccatgacggttggaagttccctgtctttattggctgtaacgacaccagtaggtttatgaagcataagataggtgtgttcatagccttgaatgattcgaccctgaaaaaggagttcttgtagccctgtatcgatattttgagctagggagcgggctgggcaaccatcgactagaatttcccctttgagtaaggcttgtttcatggcttttcggctgattttttcttgggctaataaattatctaaacgcatactgtgcctatcttatcataagtcgcttgctttgaaaaggcttgacgtgaaaagaaaagcacagtgaaaacatttacacttgcttgagttatgttatttacctgaaattatggtataatcgttcagttagaaaataaattttgaatattatagaggaaatcatgacaaaattaagagaagatatccgtaacattgcgattatcgcccacgttgaccacggtaaaacaacccttgttgacgaattattgaaacaatcagaaacgcttgatgcacgtactgaattggctgagcgtgctatggactcaaacgatatcgaaaaagagcgtggaattaccatccttgctaaaaatacagccgttgcctataacggaactcgtatcaatatcatggacacaccaggacacgcggacttcggtggagaagttgagcgtatcatgaaaatggttgacggtgttgttttggtcgtagatgcctacgaaggaacaatgccacagactcgttttgtattgaaaaaagccttggaacaagaccttgtcccaatcgtggttgttaacaaaatcgacaaaccatcagctcgcccagctgaagtagtggacgaagtcttggagcttttcatcgagcttggtgcagatgatgaccagcttgatttcccagtagtgtatgcttcagcaatcaacggaacttcttcattgtcagatgacccagctgaccaagaagctactatggcaccaatctttgacacgattattgaccatatcccagctccagtagataactcagatgagcctttgcagttccaagtatcacttttggactacaatgacttcgttggtcgtatcggtatcggtcgtgtcttccgtggtactgttaaagttggggaccaagttaccctttctaaacttgatggtacaactaaaaacttccgtgttacaaaactctttggtttctttggtttggaacgtcgtgaaattcaagaagccaaagcaggtgacttgattgccgtttcaggtatggaagatatctttgtcggcgaaactattactccgacagacgcagttgaagctcttccaatcctacacatcgatgagccaactcttcaaatgactttcttggtcaacaactcaccatttgctggtaaagaaggtaaatgggtgacttctcgtaaggtggaagaacgtttgcaggcagaattgcaaacagacgtttcccttcgtgttgacccaactgattcaccagataaatggactgtttcaggacgtggagaattgcacttgtcaatccttatcgaaacaatgcgtcgtgagggatatgaacttcaagtatctcgtccagaagttatcgtaaaagaaatcgatggtgttaaatgtgaaccatttgaacgtgttcaaatcgacactccagaagaataccaaggatctgttatccaaagcctttctgaacgtaagggtgaaatgttggatatgatttcaactggtaatggtcaaactcgtttggtcttccttgttccagcgcgtggtttaatcggatactcaactgagttcttgtcaatgactcgtggttacggtatcatgaaccatacctttgaccaatacttgccattgattccaggggaaattggtggtcgtcaccgtggtgcccttgtttctatcgatgctggtaaggctacaacttactcaatcatgtctatcgaagaacgtggtacgatctttgtcaacccaggtactgaggtttatgaaggaatgatcatcggtgaaaattctcgtgaaaacgacttgacagttaacatcactaaggcgaaacaaatgactaacgttcgttcagctactaaggaccaaacagctgttatcaagacacctcgtatcttgacacttgaagagtctcttgagttcttgaacgacgacgagtacatggaagtaacgcctgagtctatccgtttgcgtaaacaaatccttaacaaggcagagcgtgagaaagctaacaagaagaaaaaatcagctgaataagagctagaaagagataaagatggtttatttaatcataggactcctcttattactactctatgtatttgcgacaccagaaagcattaaagggacagtcaatatcgtccttgtcgtctttgctttcgtagcactcttgattttgctgatgttgtctgtcctgcaaatttttcagctaccgacagaattctttatcgcaatcgccatgctcttcctagcatactttagcttgcgagatattaccctcatgtcggttagtaaaaacaaaagaagataaaaagagagctttggctctctttttgtttgttagaatgctgaatctgagcattttcgtttagaattatttccataaaaatggtaaaatagtaagagtagaaatggagttcgagacatgaaagtaatagatcaatttaaaaataagaaagtccttgttttaggtttggccaagtcaggtgaatctgcagctcgtttgttggacaagctaggtgccattgtgacagtaaatgacgggaaacctttcgaggacaatccagctgcccaaagtttgctggaagaagggatcaaggtcattacaggtggccatccattggaacttttggatgaagagtttgccctcatggtgaaaaatccaggtatcccctacagcaatcccatgattgaaaaaggctttggccaagggaattccagtcttgactgaggtggaattagcttatttgatttctgaagcaccgattgttggtattactggttcgaacggtaaaacaaccacaacgactatgattggggaagttttgactgctgctggccaacatggtcttttatcaggaaatatcggctatcctgctagtcaggttgcacaaactgcgtcagacaaggacacgcttgtcatggaactttcttctttccaactgatgggtgttcaagaattccatcctgagattgcggttattaccaacctcatgccaactcatatcgattatcatggttcttttgaggaatatgtagcagccaagtggaatatccagaacaagatgacagcggctgatttccttgtcttgaactttaatcaagacttggcaaaagaattggcaagaaaaacacaagctaccgttgtaccattctcaacacaggaaaaggttgatggagcttatctggaagatggtcaactctacttccgtggggaagtggtcatggcagcgaatgaaatcggagttccaggtagccacaatgtggaaaatgcccttgcgacgattgctgtagccaagcttcgtggtgtggataaccaaaccatcaaagaaactctttcagcctttggaggtgtcaaacaccgtctccaatttgtggatgaaatcaagggtgtcaaattctataatgatagcaagtcaaccaatatcttggctactcaaaaagccttgtcaggatttgacaacagcaaggtcattttgattgcaggtggtttggaccgtggcaatgagtttgacgaattggtgccagatattactggactcaagaagatggtcatccttggtcagtctgcagaacgtgttaaacgggcagcagacaaggctggtgtggcatatgtggatgcgactgatattgcagatgcgacccgcaaggcctacgagcttgcgactcaaggagatgtggttcttctcagtcctgccaatgccagctgggatatgtatgctaactttgaagtacgtggcgacctctttatcgacacagtagcggagttaaaggaataatatgaaaaaaattgtctttacaggtggggggacggttggacacgtgacccttaaccttttgttaatgcctaagttcatcgaagatggttgggaagtccactatatcggggacaagcgtggtatcgaacaccaagaaatcctcaagtcaggtttggatgttaccttccattctattgcgactggaaaattgcgtcgctatttctcttggcaaaatatgctggacgtctttaaagttggctggggaattgtccaatctctttttatcatgttgcgacttcgtccacaggcccttttttcaaaggggggctttgtctctgtgccgcctgttatcgctgcgcgtgtgtcaggagtgcctgtctttattcacgaatctgacctatctatgggcttggctaataaaattgcctataaatttgcgactaagatgtattcaacctttgagcaagcttcaagtttgtctaaggtcgagcatgtgggggcagtgacaaaggtttcagaccaaaaaaattcagaaccagatgaattggtggatatccaaacccactttaatcctaaattgccaactgtattgtttgtcggtggttctgcaggcgctcgtgtctttaaccaattggtgacagactataagaaagaactgacagagcgctacaatattatcaatctaactggagattctagcctgaatgagttgagccaaaatctctttcgtgttgactatgtgaccaatctctatcaacccttgatggaattggctgatattgttgtgacacgtggtggtgccaatacgatttttgagctcttggccatggcaaaattgcatgttattgtgccacttggtcgtgaagctagtcgtggtgaccagattgaaaatgcagcttactttgtaaaaaaaggctatgcagaagagcttcaagaaagcgatttgaccttggacagtttggaagagaagctttctcacttactaagccacaaggaagactatcaagccaagatgaaggcttctaaggaattgaaatctctagcagatttttatcaattgttaaaaaaagatttatcataaggaaagtaaatgtcaaaagataagaaaaatgagggcaaagaaatcctcgaagaatttaaagagttatcagaatggcagaaacgaaaccaagaatatctaaaaaagaaggctgaggaagaagtagccctagctgaggagaaggaaaaggaaagacaagctcgaatggcttcaaaatctgaaaagtcagatgcaactgaggaccaagagagtgaatctgatccaaaagactcaaaatcagctaaggaagagtctgaagaaaaagtagaagagtcagaagacgtcaaaaaagaagtacccaaagaagaaccaaaatccaaagagccaaagaaacagaataaacaggataaaaaactagagaaaaagcctgtaaaggaaaaaccggtcaaaccgaaaattccaggagttcatatctggcgggctatctcgattttgtttctcagtctgattttattggttgtctctgcttatttgcttagtccttatgcgaccatgaaggatattcgtgttgagggaacagtgcaaactacagatgatgatattctacaggcttcaggcattcaggattcggattatacgattaaccttctgctagataaggcaaaatatgaagagcagattaagtctaattattgggttgaatcagctcagcttgtctatcaatttccaaccaagtttacaatcaaggtcaaggaatatgatattgtggcctactatgtttctggagaaaatcattatccaattctttcaagtggtcagcttgaaaccagttcggtcagtttggtgagtctgccagaaacttatatatcagttctctttaatgacagcgaacaaatcaagacctttacctcagaacttgctcaaattagcccagaactcaaagcagccatcgaaaaggtggaactagccccaagcaaggtgacatcagatttaattcgattgactatgaatgattcggacgaagtcttggttcccctttctgaaatgagtaagaaattgccttattacagtaaaattaagcctcaattgtcagaaccaagtgtgattgacatggaagctggaatttacagctacacagtggcggataaattaattatggaggctgaggaaaaagccaaacaagaggctaaggaagctgagaagaaacaaaaagaggaagagaagaaaagactggaagaacagcagaataaattagaagaggaaaggaaaaagctggaggaagagggcaatcaaaaccaaacgacccgacgttcatcgcgccgctaggtttagcttttctcttgtagttcttcagtggtcatgtttttacttgacaagttctagtagaaataatagaatagtaaaaaacctttaaagcagtccagagaggcagctaaggttagacggtgaaagggtggagactacccatttttcgtggaaccttgctgttggcaggttccttttttcgtggcttcttgtggccagactctctcactagcaaaggtaaaaggagaaacctatgcgagaacatcgtccagttattgctcttgattttcctagttttgaggcggtcaaggaatttttagctctttttccagcagaagaaagcctttatcttaaggtagggatggagctttattacgcaacggggcctgagattgtctcttacttgaaagaccaggggcacagtgtctttttggatctcaagctgcatgacattcccaatacagttaagtcagctatgaaggtcttatctcagcttggagtggatatgaccaatgttcatgctgctgggggtgtagagatgatgaaggctgcgcgtgaaggtcttggaagtcaagcaaaattgatagctgtaacgcagcttacatcaacgtcagaaactcagatgcaggactttcaaaacatccaaaccagcctgcaagagtctgtaatacattatgccaagaagacagctgaagctggcttggatggtgtcgtttgctcggctcaggaagtgcaactcatcaagcaggccaccaatccagattttatctgtctgacaccgggcattcgtcctcagggagcagcgattggagaccaaaaacgcgtcatgacgccagcggatgcttatcaaatcggtagtgactatatcgtagtgggacgtcccattacccaagctgagaatcctgttgcagcttatcatgccatcaaggatgaatggacacaggactggaattaaagaactagattagaaaaataaaaggagaagaccatgacacttgctaaagatatcgctagccacctcttgaaaattcaagccgtttacctcaaaccagaggagcctttcacttgggcatctggtatcaagtcaccgatttacactgataatcgtgtgacactagcctatcctgaaacgcgtactctaattgaaaatggttttgtagatgctatcaaagaagcctttccagaggtagaagtgattgcaggaactgcgacagcagggattcctcacggagccatcattgctgacaagatgaatctgccatttgcctacatccgtagcaaaccaaaagaccacggagctggtaaccaaatcgaaggccgcgtagctcaggggcaaaagatggtagtggttgaagatcttatttcaacaggtggttctgttcttgaagcagtagcagcagcaaaacgagaaggagcagatgtgcttggagttgtagcgattttcagctaccaattgccaaaagcagataagaacttctcagatgcaggtgttaaacttgtgacgctttctaactacagtgaattgattcatctagcccaagaagaaggctatatcacaccagaaggcttggatctcctaaaacgctttaaagaagaccaagaaaattggcaagatgcttaagacatagaaaatcaggtagtcactaggattacctgattttgtttttaatactaaagttgagcgataacttcctcagttgtcaaaacttggttggcaatgtagccgtagtttgttagtgcagcttggtaggcttcttcacctggagcaccgacagcatcgttaacaacaatgacattgtagcctaattctatgagttcacgcatgtgtgaatccacgcagagattagcattcataccagccaagatgacggtgtcgataccatttttgcggagttgaaggttaaggtcgttgctttctgggccaaagattttatgtccgttgacaacaatagtatcttcatccaaaaatggtttaatctcttcaatcatatctgctccagagccttctggaattgctgaatactggctatcacgccaaaacatttcgttttcaatcatcatcgtttcaccagcagctttaaattgccacttgtgatcgtgtggatagaagtagtgcggtgagataaaacgcttgtagccacgctctttagcaagagcgaaaagctttgtcagattttcaatagtattaactttttcaagaacatctttagttgctccgaatcctttaccagtagattttaagaattcaacttgcgggtctgtgataacaaatgcgacatttttctgattgaacatgaggttcctcctaatatgatttgattaacagccaataggaatttagactgttagtttgatgattttccaaatggtagttttagttacatactgaccgttcggtacaattataataacatctagaattgaatttgtaaatcaatttgctcagaacaaaaattttaatgataaaacagtggcaaaaggaggtggtttcaattgtttggtctcagactctgaatctgctataataggaaaaaagagaggtgagcagatgagcgttaaagagcgtattttacaaagtgctgaggaattgatttatcagaagggttatgatgccacctccatcagtgacatcatggaggtggctgatgttggcaaggggcagctttattattatttcaaatctaagaaggaaattggtttgacggtcattcaagatattttagcaaagtggcgaaaagagctttttgaagatatttttgaagcagacaagtctgacagtgacaagttttcggatatgattgactgggtttgtcaatttcatgaaagtcagacagtcttttatggttgcccaattggtaatctgattgtggaattgtccacagaagatgagaacttccgctgtcctctcaatgattttatgacccagtggacagagaagttagccagcctcttgcaagacctgcatgctgactggtcagaagaacggtcgcagttgcaggcccgtcaagtcatctccagtattcaaggcagcattgtcattctcaaagtcagccaagacatccaagttttagaaaataatatgacggatttgaaaaagaattattgttaatttttagccgaagaattaaaagtatgttaatttatggattgtggttaagaggtaagaatgacaacagatattaaaactgaaattggtcatagagtaagacaggaacgtgaacgtcacaaattgacgagagaagagatctgtggacagaagctgacttaataatcaaacagctgatgcgtactgagcttgggcaatccttgccaacaattactaagttacaatatttatctaagcgattagaagttccgatagatacttttcttgaaaataaagaactagctcttcctgaggaatactttaagataaagtaccgtatcatgaagtctccagtatagtatatggagattccaagcgtattacggaaaaactaactttaattgaggaagtttataattgttacggtgacatccttcctgaagaagagttgctgagtctagacttgattgaaagaatattaggcttgataagaacagggacaggtagtttcgctgaagatatttttgatgattattttaagcaagtaacactaaagcaagtttacacattcaatgatttactattaattgattattttgctatgcaatgtcaagacttgatttatagaagagagcattagatgattttcggattaagttgttgaaacagcaattagttagtgatgaaatgtataatgtagagctactatcagttctttgtgccatagcggttgtttatgttgttcataatgactataaacatatgatatctctagtaaaaagatgaatgaaattttatcagtaacaacgttgcaagtctataaacctggaatttcagtatttgaagctaagtgctatctttattttgaaaatgataaaaataaagcaaaggaactttatcactcagcaactatactagctgaacaatttgatgataaagtattagaaaatgaaaagattatttgaatttccataacttaagaaagttcatcatttttaattatctctgtaaaatgattgaaagtatgaaatttccaaacaaaatatttgaaaagttttgaaaaaagagttaagatatttttgtaacatacaaagtaaacgcttacttattaaggagggcattttatgtcatacaaaacaagcaatgcagaaggtcatgtagatttcattaatacctatgatttggagccaatggcgcaacaagttattcctaaagcagcatttggctatatcgctagtggggcggaagatactttcactttgcgtgagaatattcgtgcctttaaccacaaactcatcgttcctcatacactttgcaatgtagaaaatccaagtacagagattgaatttgcaggtgaaaaattgtcttcaccaatcattatggcgcctgttgcagctcataaattggcaaatgaacaaggtgaagtggcgactgcgcgtggtgtgcatgagtttggttctctttacacaactagctcttactctactgtagatcttccagaaattacggaagcccttcaagggacacctcattggttccaattttactttagtaaagatgatggaatcaaccgccacatcatggaccgtgtgaaggctgaaggttataaagcgattgtcttgacggcagatgcgactgtagggggcaatcgtgaggtggacaaacgtaatggttttgtcttcccagttggcatgccgattgttgaagaatacctgccagaaggtgctggtaaatcaatggactttgtttacaaatcagctaaacaacgcttgtctccacgtgatgtagaatttatcgctgaatactcaggacttcctgtttatgtcaagggaccacaatgccgtgaggacgttgaacgttcgcttgctgcaggtgcttctggtatctgggtgaccaaccatggtggccgtcaaatcgacggtggaccagctgccttcgattcacttcaagaagtagctgaagcagttgataaacgtgtgccaattgtctttgactctggtattcgtcgtggccaacacgtctttaaagccttggcttcaggagcagacttggtagctattggccgcccggttatctatggcttggctctcggcggtagtgttggtgtgcgtcaagtctttgaacacttgaatgcagaattgaagacagttatgcagttatctggaactcagactattgaagatgtcaaacacttcaaactccgtcacaacccatacaatccaaccttcccagttgaccctcgtgacttaaaattgtattgataaaatagcttgcctccacttgatgtggaggtttttcttcgtctataggaagaataaatcaccattgaaatctatataaatatatttttcagtcaaatatcttgctagggctttcattttttgctatactggtccagtaattaaataataaagacatttggggtgctttaggctgagatgatacccattgaacctgatacagttaagactggcgaagggaaatgtgaaacgttttttcgtatggcgaaatgaacaatctaatcttgtaagctaaactctaattcttgattgtaattggagtttttttgtttatataagctgaatgaaggtgatacaaagcatttaggtagctcttcttgaacgcccttgattttctttaaaaaggtcaagtaaaactaggattttcttgatgttttgttgattacgaacgagtaaagagaggaaaagtaaatatggaaacacaagactatgcatttcagccaggtttgactgttggagaattattaaaaagtagtcagaaggattggcaggctgcaatcaatcatcgttttgttaaggaactttttgcggggacaattgagaataaggtcttaaaagaatacctaattcaagattatcacttctttgatgccttcttatccatgctgggtgcctgcgtagcccacgcagaccagcttgaatccaagcttcgttttgccaagcaactaggctttcttgaagcagatgaagacggttatttccagaaggctttcaaagagttaaaagtatctgagaatgattatctggaagtgaccttgcatcctgtaacaaaagcctttcaggatctaatgtattcggcagtggattcatcaaactatgcacatcttttggtcatgctggtcattgcagaaggtctctatttagactggggttctaaagatttggctctacctgaagcctacattcattcggaatggatcaatctccacagaggtcctttctttgcagagtgggttcaatttctggttgatgaacttaatcgtgttgggaaaggtctagaagatttgacagaacttcagcaacgctggaatcaagcagtcgttttagaattagccttttttgatattggttacgatgcctagagaaagtttaggatatttacaaatttgatgaggtaattctcttcgaaaatcaaattcaaaccacgtcagcttcaccttgccgtactcaagtacagcctacggctagcttcctagtttgctctttgattttcattgagcataaatcattcaatgtaaataaaaaaaatttcttaacgaaagatagagataaatcgaaatcagtagatcgtataaagtgaaaaggaaagatttcaatatgacaagtttaaaattattaaaagaaaaagcacctttggtcatttgtatcaccaatgatgtagtaaaaaatttcacagcaaatggattagtagcactgggtgcatcaccagccatgagtgagtttccagcagatttagaggatttgttaaagtatgctggtggtttattaataaacataggaacattaacagatgaaaattggaaattataccaagctgctctgaaaattgcagagaaatataatgtcccagcagttttagatcctgtagcctgtggagcaggagaatatagaaaaaaagtagcagatgatctaattaacaattacaaactagcagcgattagaggaaatgctggcgagattgcctctttagtaggaataaatgtggaatctaaaggagtagatagtgcgggtgtagataatattgacgaaattgctctagcagcaaatgagaagtttaatattccaattgtagtaacaggtgaagtggatgctattgcggtaaatggagaagtggtaacgattcataatggtagtgccatgatgccaaaagttattgggacaggatgcttattaggtgctgtagtagcaagctttatcggactagaaaaaggtcaagaattgaaatcattagaaacagcaatgttggtttacaatatcgctggagaaatggcagaaaaacgtccaaatgggcatcttcctggaacatttaaagttgaatttataaatgccttatacgagattacagacgaagatgtaaagaaattcaaaagagtgaagaaaaatgtttcataaagaattactaaaactatattttatttgtggaacgactacttgccaaggaaaagatctatatacggtcgttgaggaagccttaaaaggtggtataaccttatttcaattccgtgaaaaaggtgagggagccctgaaaggtatagaaaaagtcgaactagcaataaaactacaggctctttgtaaaaaatataatgttccatttatcgttaatgatgatattgatttggcattggaaatagatgctgatggcgtacatgtaggacaagatgaccttggagttgatgaaattagaaaattgatgccagataaaataattggtctttctataaaaaacgaggaagaatttcaacaatcaaaagttgaatatgtagattatgttggtgttggtcctgtatttgatacccagtcaaaggatgatgctggtggtgctataggttatgaaggtcttaaattgatgagaaaactattgccacaaatgcccttagttgcaattggtgggatacagacgcaacatattaaagacattatgaagaccaatgttgacggtgtttcaatcatttcagcaatatcgtatgcaaaaaatatagaaaaaactgttcgagaaatgagtgaaaaataggtatcgatctaaccaaagaaagatctgctgtatttccagttcaatttcttgaactggaaaaaatcgtttgttataatatttatataattaaataataaagacatttggggtgctttaggctgagatgatacccattgaacctgatacagttaagactggcgaagggaaatgtgaaatggttttgtatttatagaaactaaccatctaatcttgtaagctgaactctaattcctatctgtaattagagttttttcttttacgaaactggatgaagatgatacaaagcatttaggtagctcacattgaataccccacttttctttaaaaaaggagtttttttatgttgaaaaaatggcagttaaaagatgttatcttacttgctttcttgtctatcttttttggtggtgtttttgtgggttcaggctatctgtttgatatcctcaccctgattttagcacctcttggtttacaggcctttgccaatgaaatcctctttggtctctggtgtatggctgcgcctattgctgcaatctttgttccaagagtcggaagtgcaacgattggagaagtgctagctgcgcttgctgaagtcctttatggtagccaattcggtctaggtgcccttttgtctggcttggttcaaggtttgggaagtgaacttggttttatcgtaaccaagaatcgctatgaaagttggctctctctaactgccaatagtattgggattacgcttgttagctttgtctatgaatacattaagttaggttactatgccttctcccttccttttgtcctttccttgcttgtagtacgttttatttccgtctttttcttctgtaccatcttggttcgtgccattgtcaaactctatcatcagtttgcagctggaggcaaggcatagatggggctggaactacgagcgattcagtcaccaatcttccctgagccgcttgattttacttttcatgcgcaagcctttaccttgttagttgggagcagtggttcaggaaaatccagcctctttcaaatgattgcccaagtcagttctcttccctatagcggtcaagtcctgataaatgggagcgaggtcagtcagctttctatcatcgaacgtgtccagacggttggtattctctttcaaaatcccaatcatcaatttaccatggagaacttgtttgaggagctgatttttaccttggaaaatattgggcatcccgttcaggaaattgattctaaaatagcagatgtggttcgacaatgtcgctgcgagaagatcttgcaccgtcccatccatcacttatcaggtggggaaaagcaaaaggctgctttggctgttctctttgctatgaatcctagggtctatctcttggatgagcccttcgcttccattgaccgcaagagtaggatagagatattggagattctaaaagagttggcctctaatgggaagacagttattttgtgcgaccatgatttatctgactatgaagcctatatcgaccatatggtggagctaagagacggacaactaacgaaaataaatcaaatccctgcctctgaaatgacacaggctgtttcaaaggagattgcttctagcccagaactattccatatggatcgaacaacttgtgagctggataagcatcccctcttttcaattgcggatttcacattttaccaagggatttcctgtatcttgggtgataatggtgtcgggaaatcaaccctctttcgatctattcttcaatttcaaaagtataaggggcgcattacctggaaggggacagtcctgaaaaagaaaaagagtttgtatcgtgacctgacgggtgttgttcaggaagctgagaagcagtttatcagagtcagtctgcgagaggaactgcaattagatagtccagactctgaaagaaatcagcggattctccaagctttacaatattttgatctggagcaggcatttgataagagtccctatcaattaagtggtggccagcaaaagattcttcagctcttgaccatcttgaccagcaaggcgtctgtgattttgctagatgaaccttttgcaggtttggatgatagagcctgccattatttttgcaagtggattgtggaggagagaaatcagggaagaagttttctgatcattagccatcgtttagatcccttgatctctgtggttgattattggattgagatgactagtcagggtctcagtcatgtgaaaaaagtgacaattaccaaaccactcacatctcagagtagcaatactcaaggggaggtgagatagtatggtcaaagtagcaacccagacaccgattatcagtctcttcttgctgattttatccttggaaacatctttcattccttcgattgctcttaatctctcggtagtcgcattttgcattctctttatgctctattaccggcgatttaaagtattggcttggatgattctgctcgccattttgccatccttggccaactactgggcagttcagttacatggggatgcttcgcaggcagtcatgcttggaacgagggcctttgtgaccgtttgtattggtcttgtctttgtttcctctatttccctaaaagagcttctcttgtacttggctcaaaaggggttatcacgctcttgggcctatgccttgattgtggtattcaattccttcccccttatccagcaagaaatcaagtccctcaaggaagcttgcttattacgcggtcaagaactacatttttggtcgcccttgatttacagcaaggttctgatgacagtctttaggtggcgccatctttacctgagagccctatcggcgcatggatatgacgaacatgcacaggcggagaatcgctatcggactttttatattcctcaaaggacactattcatctacctgcttttctttttattgcttcaaaccagtctatttttataaaggagttattatggaatttacagatattgcgatggaattatccaaggaagcttggcagacttcctttcatcacccctttgttttacagttgcaagagggaaatttagacctgtccatctttcgctattacttgattcaggatgcctactatttgaaggccttctcagaagcctatcacctcttggctgataagacttcaaatcaagagatgaaaagactcttgaaacaaaatgctcagagtctagtggaaggtgagttatttatccgccaacaatttttcaaggaattggaaatcagcgatcaggaaatggatgagcatccaatcgctccaacctgctatcattatatctctcacatttatcggcaatttgcagagccaaacttgggtattgcctttgcaagcttgctgccttgtccttggctatatcatgatataggcaaatcacttaatcttaaaccatcaccaaatcctctctatcaacaatggattgaaacgtatattacggatgaattggagcagcagatcagagaggaagaggctctggtcaatcaactctatcgagaaagtgacgagacagacaagaaaaaaatgctagatgccttccacatcagtgttcatatggaagctaagttttgggaaatggcctaccaacaccagacatggaagagcgatttacagtctttagaaacaggagaagaatagaaacatgagaaagcaccaattacaagttcacaaattaaccattttatccatgatgattgcccttgatgtagtccttacgcctatctttcggattgagggaatggcaccgatgtccagtgtagtcaatattctagctggaatcatgatgggacctgtttatgccttggctatggctacagtgacagcctttatccgtatgacgactcaagggattccgcctttagctctcacaggagcgacttttggagcccttctagcaggtctcttttataagtatggtagaaaattttacttttctgctttgggagaaattttgggaacaggtattattggttctattgtttcctatcctgttatggtactctttacaggatcggccgctaagcttagttggtttatctacactcctcgatttttcggtgcaaccttgattggtacagcgatttcctttattgcctttcgatttttaatcaagcaggaattctttaaaaaagttcagggatatttctttgatgaaaggatagactgatgcaggcatttacaaatccttttcctctggcaacgacttccctcattcactgtattaccaatgagatttcttgtgagatgctagcaaatgggattttggctctgggatgtaaaccagttatggcagatgatccccgtgaggttcttgattttactaagcaaagccaggcactcttcatcaatttggggcatttgtcagctgagaaggaaaaagcaatccgtatggcagcttcttatgcagatcaagtttgtcttccaatggtagtagatgcagttggcgtaacagtttcatccattcgtaagagcttagttaaagaccttttagactatagacctacggtacttaaaggaaatatgtcggaaatccgaagtcttgttggcttaaaacaccacggcgttggggtagatgcgagtgctaaagatcaagaaactgaggatttgcttcaagtcttgaaagactggtgtcagatctatccaggtatgtcattcttagtcacaggccctaaggacctcatcgtttcgaagaatcaggtcgctgtactgggaaatggctgtgctgaattagactggataacagggacaggagacttggttggagctttaacagctgtttttctcagccaaggaaagactgcctttgaagcttctttcctagcggtttcttatctcaatatctccgctgagagaatagttgttcaaggaatgggattggaagattttcgttaccaagtactcaatcagctttcactcctcaaaagagatgaaaactggctagatgctatcaaaggagaggtttatgaatagagaagcacttagactatatctggtaaccaatcgctaccaagattccttgcaaagttttcttgaaaagattgagacggcttgccgctcaggggttaccatagtccaattacgagaaaaaaatctcacaacaaatcaatattatcaactggcaaaacaagtcaaggaaataacagatgcctatcaggtacccttgataatcgatgatcgtttggatgtttgtcttgcggttgatgctgctggtctgcatattggagacgatgaactaccagtttcggttgcccgcaaagtcctaggtcctgaaaaaatcctcggtgtcacagctaaaactgtaaaaagagccctcgaggcagaagaaggaggtgcggattacttggggacaggagccattttcccgactacgaccaaggaaaatgcacccatcactctgatttcaaccttgaagacaatttgccaaagggttgccattccagtagttgccattggcggcttgacatcagagaacattgaccaacttatcggcacgggcatagctggtgtagctgtagtgcgtgatttgatgcaggcagaagatatagagacaaaaacgcaagcctttttgacaaagttggatgacattattttctaattaatactcaatgaaaatcaaagagcaaactaggaagctagtcgcaggttgctcaaagcacagctttgaggttgcagataaagctgacgtcgtttgaagagattttcgaagagtataaaaactctctaattcccttaaagtaggaactagagagtttttttaatctttaaagcttgtatggttaactgggccagaaccatgaccgagttgaggggcgtcttggatggctttcgtgataaaggccttggctttatcgactgcttgatagagggttttccccttggctagttcagcagtaatcactgcagcaaaggtacatccagtaccatgtgtatgacaggtttgaattcgtggactttcccagacaaattggtcctccttggtaaagaggaaatccttggcaccgccttcgagatggcctcctttgatgacaacagactgaggaccaaattcttttaaaatcaggcgaccggcacgctgcatgtcttcaggatcatggattgaaaaaccaacaatctcttctgcctcaggaagattgggtgtaataatagttgcaaggggaagtagatttgtttttaggtagtctctggcactggtatcaatcagggtgtctccgcttgttgcgaccataacagggtcaaggacgtagggacaatccagctttttaagatagggctggatgatctccatgatctcagtagttgccaacatccctgtttttacagcctgaggtggaatatcagaaaagacactctccaattgggctttcaacatttgaggagaaacgtgctcgattaattgaacacctctggtattttgagcgacaagactggtcacaacggccattccatagacatctctagcttggaacgactttaagtcagccataatgccagcaccaccactagggtcagtccctgcaatggtcaaagcaacgggtaaataagtcatctaaaacctcccaaccaactgaagtttgtattcttaagaacaagctagtctgttttagaaaggcaatagaagactgctagtccccattatcatttccacttccatcagctagcattacctagattgagtcaaagggtctaacagtcgttaatctcagctttacgcacccctagtggttgttttcttttttctttagtatagcatattttcatagtttatatagtaagatttgactgcaaatcctttatcatagggttaaaattcaatttttcaaagaaaagattaatttcatagttgacaaatgtagattttaagagtatactgataattgtaattgacaaatgtagattttggaggtgtgattatgcagatttcagatgcagaatggcaggtcatgaagattatttggatgcaaggagagcagactagttcagatttgattagggttctggcggagcggttcgactggtccaagtcgaccattcaaactcttttggctcgtttggttgagaaagagtgcctgacgaggaaaaaagaaggcaagtcctttgtctattcagcccttttaactttggatcaaagtcgagacttgcttgttcaagatatcaaagataaagtttgttcccgtaggattaagaacttgttggctgatttgattgctgaatgtgattttactcaggctgacttggaagacttggaagctgtgatttctgagaagaaatcaagcgctgtaacagaagtaaaatgtaattgtatgtaaaggagacgtcatgttgaatattattgtaaccattatttgtattgcccttatcgcgtttatcttgttttggtttttcaaaaagcctgaaaaatctggacaaaaggcccagcaaaaaaacggctaccaagagattcgagtggaggtcatggggggctatacgcctgagttgattatcctcaagaaatcagtgccagcccgcattgtctttgaccgcaaagatccttcaccatgtttggatcagatcgtatttccagactttggtgtacatgcggatctgccaatgggggaagagtatgtagtggaaatcacgcctgagcaggctggagagtatggtttctcttgtggcatgaatatgatgcacggtaagatgattgtagaataggagaatgatatgactgaaattgtaaaagcaagtcttgaaaatggtgttcaaaaaatccgtatcacggcagacaaaggctaccatccagcccacattcaactgcaaaaaggagttcctgctgagatcacctttcaccgtttgacaccttcaaactgttataaggaaattctgtttgaagaagaaggcctcttggaaccaatcggcgtggatgaagagaagacaattcgttttacccctcaagaattaggtcaacatgaattttcttgtggtatgaagatgcaaaagggaagttatacagttgttgagaagactcgaaaatctctatcacttttacagcgtttttggattactagtatctttactgtgcctcttgtaatcctcatgattgggatgtcgacaggaggaattagtcaccaagtcatgcgttggggcacctttttagccacaacaccgattatgctagtagcaggtggtccttatatccaaagtgcttgggctagttttaaaaagcacaatgccaacatggataccttggttgctctgggaaccctagtggcctatttctatagcttagttgccctcttcgctggcctccccgtttactttgaaagtgctgcctttatcttcttcttcgttcttatgggagccgtttttgaggagaaaatgcggaaaaatacttcccaagctgtggagaaattacttgacttgcaggctaaaacagcagaagtattgcgtgaggataactatgttcaagtccctttggagcaagtcaaggtaggtgacctgattcgagtgcgtcccggtgaaaagattgcggttgatggtgtcgtagtagaaggtatctctagtattgatgagtctatggtgacaggtgagagtctgcctgtggacaagacagttggagataccgtcattggttcaaccatcaataatagtggaacacttgtttttagagcagaaaaagttggttcagagactgttttggctcagattgtggattttgtgaagaaagctcagacaagtcgtgcgccgattcaggacttgacggataaaatttcagggatttttgttccagcagttgtcattttagggattgtgaccttttgggtttggttcgtcttgctcagggatagtgtagttgtgcttggagcgagctttgtgtcttcgcttctctatggagtagcagttctgattattgcctgcccttgtgcattgggacttgcaacaccgacagcccttatggtggggacaggtcgcagtgccaagatgggagttctcctcaaaaatggaacggttctacaggaaatccagaaagtccaaactattgtttttgataagacaggaactttgacggaagggaaacctgtggtcacagatatcatcggcgacgaagtagaagtgcttggattggcagcttccttggaagaagcttctcaacacccattggctgaggctattgttaagcgagcgactgaaactggacttgagcttcacactgtggaaaatttccaagccttgcacggaaaaggtgtttcagggcaaatcaatggaaaacaagttttgcttggaaatgctaaaatgctggatggcatggatatttctagcacttatcaggaaaaactagaacaactggaaaaagaagctaagacagttgtgttcttggctgttgagaatgaaatcaaaggcttgcttgctctgcaagatattcctaaggaaaatgctaagcttgccatcagtcagttgaaaaaacgaggtcttaaaacagtcatgctgacaggagacaatgctggtgtggcgcgtgccattgccgatcagatcggaatcgaagaggtcattgcaggtgtcttgccagaggaaaaagctcatgaaatccataaactacaagcgtctggcaaagtagcctttgttggggatggtatcaatgacgctcctgcccttagtgtagcagatgtggggattgctatgggagctggaacagatattgccatcgagtcagcagatttggtgttgacaactaataacctcctaggagtggttcgtgcttttgacatgagtaagaaaacctttaatcgaattctgctcaatcttttctgggcctttatctacaatgtcgccggaattccgattgcagcaggagtcttttcaggtgttggactggctctcaacccagaactggcaggtctagccatggcctttagttctgtatccgttctgaccagttcactcttactaaactttagtaaaatagactaaaagcgggcttgctcgctttttatactcttcaaaaatctcttccaaccacgtcagctttgtctgcaacctcaaagctgtgctttgagcaacctgtggcgagcttcctagtttgctctgtgattttcattgagtattataaaacagaagctaaaaacgttttcaaactgtactgtaatagagaataaaaacttctgagcagattcttagtaaagtcaaaataaatgtgataaattagtattgtaaaaatttactgaaacgttttcaaaaactatatgaaaccttttttagtagatttaaaaatatttgaaggagagttatcattatgactcaagggaaaattactgcatctgcagcaatgcttaatgtattgaaaacatggggcgtagacacaatctacggtatcccatcaggaacactcagctcattgatggatgctttggctgaagacaaagatatccgcttcttgcaagttcgtcacgaagaaacaggtgctcttgcagcggttatgcaagctaaattcggcggctcaatcggggttgcagttggttcaggtggtccaggtgcgactcacttgattaacggtgtttacgatgcagctatggataacactccattcctagcaatccttggatcacgtccagttaacgaactcaacatggatgctttccaagaattgaaccaaaacccaatgtacaacggtatcgctgtatacaacaaacgtgtagcttacgctgagcaattgccaaaagtaatcgacgaagcttgccgtgctgcagtttctaaaaaaggtccagctgttgttgaaatcccagtaaacttcggtttccaagaaatcgacgaaaattcatactacggttcaggttcatacgaacgttcattcatcgctcctgctttgaacgaagttgaaatcgacaaagctgttgaaatcttgaacaatgctgaacgtccagttatctatgctggttacggtggtgttaaagctggtgaagtgattactgaattgtcacgtaaaatcaaagcaccaatcatcacaactggtaaaaactttgaagcctttgaatggaactatgaaggtttgacaggttctgcttaccgtgttggttggaagccagccaacgaagtggtctttgaagcagacacagttcttttccttggttcaaacttcccatttgctgaagtttaccaagcattcaagaatactgaaaaattcatccaagtggatatcgacccttacaaacttggtaaacgtcatgccctagacgcttcaatccttggtgatgcaggtcaagcagctaaagctatccttgacaaagtgaacccagttgaatctactccatggtggcgtgcaaacgttaagaacaaccaaaactggcgtgattacatgaacaaaatcgaaggtaaaactgagggtgaattgcaattgtatcaagtttacaatgcaatcaacaaacatgctgatcaagacgctatctactcaatcgacgtaggtgacactactcaaacatctactcgtcaccttcacatgacacctaagaacatgtggcgtacatctccactctttgcgacaatgggtattgcccttcctggtggtatcgctgctaagaaagacaatccagatcgccaagtatggaacatcatgggtgacggtgcattcaacatgtgctacccagacgttatcacaaacgttcaatacgaccttccagttatcaacgttgtcttctcaaatggtaaatatgccttcatcaaggacaaatacgaagacacaaacaaacacttgtttggttgtgacttccctaatgctgactatgcgaaaatcgctgaagctcaaggtgctgtaggatttacagttgaccgtatcgaagacatcgatgcagttgttgcagaagctgttaaactcaacaaagaaggtaaaactgttgtgatcgatgctcgcatcactccacaccgtccacttccagtagaagtacttgaattggatccaaaacttcactcagaagaagcaatcaaagacttcaaggaaaaatacgaagcagaagaactcgtaccattccgcctcttcttggaagaagaaggtttgcaatcacgcgcaattaaataattcctctcgtcgaaaatcaaatttaaactgtgttatcttcaccttgccgtacttcagtactgcctgcggttcgatgccttgtttattctttgattttcttagagcgaaacttaaaaagatcggagcaatccggtctttttatggaggatagtaaatgaatttaaatcaattagatattatcgtttccgatgttccacaagtctgtgctgacttggagcgtattttggataaaaaatccgattatgttgatgacagttttgctcagtttacgattggcagtcactgtctgatgttgtcccaaaatcatttgattcctttggaagattttcagtcaggaatcattcttcatatcgaggttgaggatgtagaccagaattaccaacggttgaaagaacttggtatccaggttttaaacggaccaactgtaaccgattggggaacagagtccttattagttaaagggcctgctggtctagtgattgatttttatcgtatgaagtaggtaattctattatcaaattttttatctaaacattcttggagtgaaacttaaaaagatcggagcaattcgatcttttttgtatttatgcgactttcagtccgtctcgctccgttaggtgcgagacaaaaaaccacccgttttcacgggtggttatgatttctacacttattgtttggcttcctgttttaattgttgcacctgttcctcgtactggacaagctccctgtcttttatattgatagtcgcttctgcttcagcaatgcggcttctcagatcttgagtcttgttatggtgatagctaataccaatagcactaccagcaatgatcccgattactagacaagtaaaaatcaccaaaatcaagggagcagatagttgtgtaaagacaagactgacagttactgtttgacgattgagtagaccaaatgagatcacaatgactaataagctcaaaccgccaattagataagccttatctttcagtgacaattcattaaatttttttagcataagttccttttctcctgactatgttgatagaaaactacacaccatttaggtattaacaaaattcattttactagaaaatttcgatactgtcaataatttctaacggcttatttaccatcaatcaatcgattcattgaaaaggagtattcattttctaatatttgattgagtaaacagaacggagcaattcggtcttttttctgttccctctttcttataacaagattgtgatagtttatatctttataacaaaagttttaaagacttgattgttttgaaagaatattttaaaataagattcagtaaaaatgaaagaggttttgaaaatgtctgaaaaacaaatgaaaattttaggttgggtagcgacctttatgtctgttatgatgtatgtgtcttacttcccacaaatcatgaacaatctggctggtcaaaaaggaaatttcatccagcccttggttgctgccatcaactgtagtctctgggtttactacggtcttttcaaaaaagaaagagatatcccccttgcagcagctaatgcaccaggtattatttttggcctagtgacggttattacagctttgatttaaaaggaacagaggagactagttttcagtcttcttttttgtttcaggggaggctatttactttttctagaggataattttttaaaaaacaatctgataaacttaaatagtagaatagtatcagtatgtcacagtattttataagaaaaggtttacagaataagttataatataagtaaatgaacaagcaaataagaaagtgagtagagttatgaccgaaaaactgacttttccggatggtttcttgtggggcggagcgacagctgccaaccagtgtgagggtgcttataatttaaaaggtcgtggattggcgaatgtggatgtcgtccccatcggtccagatcgtgaagccattatcacaggtcagaaaaagatgttttcgtttgaggagggctatttttacccagccaagcaagctattgatatgtaccatcattacaaggaagatattgccctttttgcggaaatgggctttaagacttatcgtctatccattgcttggactcggatttttcctaagggcgacgaaacagtgccaaatgaagctggtctagccttttatgaggatttatttaaggagtgccacaagtatggtatccaacctctggtgactatcactcatttcgactgtcctatgcacttgattacagagtacggtggttggcgcaatcgtcggatgttagacttctatgaaaaactttgtcgcacactctttacccgctataagggtttggtcaaatattggcttaccttcaacgaaatcaacatgattctccatgccccctttatgggagctgggctctgttttgaagaaggagaaaatcaagaactggttaaatatcaggctgcacactatgagttggtagcttcagctcttgcgacaaagattgcccacgaaattgacccagaaaataaggtgggatgtatgttggctgcagggcaatactatcctaacacagcccatccaagagactactgggcagccatggaggaagaccgcaagagttacttcttcattgatgttcaagcgcgtggggaatacccaaattacgcaaagaagcagtgggagcgtgagggaattaagattcaaatgacgttagaggatttggacttgttgaagaatcatactgttgactttgtttccttctcttactatgcgagccgagtggcctcaggggatccagaagtgaggaatatgaccgctggaaatgtctttgcctctatcaaaaatccttatctggaatcctctgaatggggttggcagattgacccattgggacttcgtatcaccctcaatgccatctgggatcgttaccaaaaacctatgttcatcgtagaaaatggactcggtgttatagacacgccagatgaaaatggctatgtagcggatgactatcgaattgcttatttagaggcccacatcaaggctatgcgagatgccatttaccaagatggggttgacttgctcggttatacgacttggggatgtatcgatttggtttcagctggaacgggcgaaatgaacaagcgctatggctttatctatgtggatcgagataatgcgagtcaaggaagtctcaaacggagcaagaagaaatccttctactggtacaaggatgtcattgccagcaatggtgcaagtattgagtagagcacatttgttcactatttttataaaatcttctctctactttatataataggaaaaagagttcaattagacctggctttttgctataatgaggggagaaaaatcagacaggagaataagatgtcagaaccattatttttacaatcagttatgcaagaaaaaatctggggtggaaccaagctacgtgatgagtttggctacgacatcccaagtgaaaaaatcggagaatactgggccatctcagctcatccaaatggagtctctaaagtttccaatggtcgttacgagggaacagacctagctactttgtatgcagaacaccgtgaattgtttggcaatcgtccagaacctgtatttccgcttttgactaagattctggatgccaacgactggctcagcgtccaagttcacccagatgatgcttatggactggagcatgaaggcgaacttggaaaaacagaatgctggtacattatcgcagcggatgaaggttcagagattatctacggtcacaatgctaagtcaaaagaagaactccgccagcaaatcgaggataaaaactgggaggacttgctgacaaaagttcctgttaaggctggagatttcttctatgtgccaagtggcaccatgcatgctatcggggcaggcatcttgattcttgaaacccaacagtctagtgatacaacttaccgcgtctatgactttgaccgtaaggatgataatggcaacttgcgtgaacttcaccttgaaaaatctatcgatgttttgaacattggagagcctgccaatagccgtcctgtaactgttaaagcagatgatttgcgttccactctccttgtatctaatgatttctttgtagtttacaagtgggaaatcactggaaaagttgattttgagaagacagctgattacaccttattcagtgtcttagctggtcaaggtcagctaactgttgacggaaaaaactatccaatccaaaaaggcagccactttatcctaccaagtgatgttgaagcttggattctggaagggcaaggtttggaattgattgttagtcatccataaaaaagaaagggcctgagttcattactcaagtcctttttgattacataaattgggcgataaagaccacgatgatgatgataggaatgataaaacgaagaaggaagagccagacctggaaaagtccctgtttacatgctcgttcatcaaggtgtagttcctccatggcaagagccttcttaaaaatatagcctgtaaagagtgaaaggcagagagcaccaaatggcatgaggagattagaaaccaagaagtccatagcatcaaagaaggtcttcccaaagatatgaacatccgccataacaccgtaagatagggctgaaggaattccaaagacaaaggtcaagattcctaaaatagcactccatttagcacgcttactgttgtcctgattggtgatattacccacattgatttccagcataacaacggaagaagtgaccgtcgcaaagaggaagagcaggaggaagaggatgtagaaaatggttccaaaaggcatcttgtcaaagagctgaggcaagacgataaatagcaagcttggtcccccttcagactggatattgaaggctgacatggctgggaaaatggctagacctgccatgatggataccgagatattcatggctacgatggaaatccctgactgaaccagattggttttcttatccaagtaagaagcataggtcagcatggctgtaacccctagtgagagggcaaagaaagattgtcccagagcatataggagaccagcactggtcagcttagagaagtctggttttaggaagtaaagaaccccttccatggcatttggcaaactgagagaacgaccgatgatgacgacaaagatgataaagagcaggggcatcatgactttcgaagctctttcaatccctttttgaaccccacgtgatacaatgaagatattcaataggataaaggctgcttgagctcctagggcaatggctggatttgaaatgattgaagtaaataactgagcataatcccccgttccaccaatttggaacaattttccaaactcaatgcctagataaaccagaatccatcccccaataacactgtagaaagataagaggataaagagggcaaaggcaccaatccaaccgataaagttgtacttactattcttgccgagttttccaaaggttttgattgctgaaacaccagcactacggccaagggcaaattcagcaagcaggagcgggaaaccgattaaaatggtagaaataagaaagactagtaaaaagcctccaccgccattagcagcagtcatatagggaaatttccaaacggctccaagtccgatagctgaaccagcagatgctagaataaagcctagtttagaacccccattgcgatttttcagaccaatagttaaactcctaa

SEQ ID NO: 60 - DNA, 91167 bp, Streptococcus mitis NCTC 12261 contig6
tttcggacttttactcaggtgaaaattttggcggagtctgggcaaacagaatcgcagattgcaagtagtttaggtagttttctcggacgcaatccaaatccctatcagattaagtttgcgcttagggattcgcgaggactttccttgagctttttgaagcaagctatttcctatttgattgagacagactatcagattaagacaggtctttatgaaaaaggtttccttttgaaaaaggcactcttacagattgctagtcaggttaattgacatttttttgaaactataacccgcgtcaggattatcttgtcgtgggtttcttgctgatttgcttattttatactcaatgaaaatcaaagagcaaactaggaaactagccgtaggttgctcaaagcactgctttgaggttgtaaataaggctgacgaagtcagctcaaaacatgtttttgaggttgcggatgaaactgacgaagtcagtaattatatctacggcaaggcgacgttgacgcggtttgaagagattttcgaagagtattattagaaagtatctcagtgatttcctcatctataagcaaaaaacttgaaaaaagtgaatgtttgcgttatcattttcatatagaaagaaaaagaggtattacagatggctattatcttaccagatcttccatatgcatacgacgctttggaaccatacatcgatgcggaaacaatgcacttgcaccatgacaaacaccatcaaacttatgtcaacaatgccaatgcagctctagaaaaacaccctgaaatcggtgaagatcttgaagccttgcttgctgatgtagaatctattccagctgatatccgtcaagcacttattaacaacggcggtggacacttgaaccacgctcttttctgggaattgatgactcctgagaaaacagctccatcagcagaacttgcagcagcaatcgatgcaacatttggttcatttgaagaattccaagcagccttcactgcagcagcaacaactcgtttcggttctggctgggcatggttggttgtcaacaaagaaggtaaacttgaagtgacttcaacagcaaaccaagacacaccaatctcagaaggtaaaaaaccaatcttgggcttggacgtttgggaacatgcttactacgtgaaataccgcaacgtgcgtcctgactacatcaaagctttcttctcagtgatcaactggaacaaagtagatgaattgtacgcagctgctaaataatgatatgatatatggagggaagaattgttcttctctttttaaggttatattattttggtctgacaaaatcgtcagacttttttcatttttatgagaaacgtgctaactgctagaaattatggtagaataaagtattaagtaatcgtggaaaaaggatatctatgcgaaaagaaattgcacctgaattatacaactataacaagtttcctggtcctgagttccatttacatggggacaaggttgaaacggaagggatagctttttccttggtggaaaatatcaaggatgcctttgatgtgacggcttttaatcagcgtttttcagaagtcttaaccaagtttgattatatcgtgggagactggagcaacgaacagcttcgcctacgaggtttttacaaggatgatcgaacagaagaaaaacttgaaaaaatcagtcgtttacaagactaccttttagagtattgtagttatggttgtgcctattttgtcttatcaaatgaagcccctaagcgagcatcatttgacaagaaaatgcgtaagaaggaagaagaacagccttctagaaaaggaaagaaaccgactcaaaccaaacgaaaaccgaatgcagataagaaaaatagacgtcgtcagaaagaccagcattctcagaaagaggacaaggggcaacgtcattttgtcattcgtcagaagtgagtagagaataaggagaagaaatgaaaccgtcaatttatagtttaacacgtcaaaccatgcaggaatgggttttggagcagggagaaaagaaattccgtgcagatcaaatctgggaatggctttaccgtaaacgtgtccagtcatttgaagagatgaccaacctttccaaggatttgattgctaaactcaatgaacaatttgtggtcaatcccttgaaacagcgtatcgttcaagagtctgctgatggtaccgttaaatatctttttgaattgcctgatggtatgttgattgagacagtactgatgcgtcaacactacgggctgtcagtctgtgtgaccactcaggtcggctgtaatatcggttgtaccttctgtgcttctggtttgattaagaaacaacgtgacctcaataacggtgaaatcgtagcgcaaatcatgctggttcagaaatactttgatgaacgtggtcaggatgaacgcgtcagccatatcgttgtcatgggaatcggtgaaccttttgataactacaacaatgtcttgaatttcgttcgtactatcaacgatgacaagggaatggctatcggtgctcgtcacatcacggtttcaacctcaggtttggcccataaaattcgtgattttgctaatgaaggagttcaggtcaatcttgccgtttcccttcacgcacctaacaatgagttgcgttcaagcatcatgaagattaaccgtgcatttccgattgaaaaactctttgctgctattgagtattatatcgaaacaacaaatcgtcgtgtgacctttgagtatatcatgctcaatgaagttaatgacggtgtagaacaagccttggaattggctgaattgctcaagaatatcaagaaattgtcttatgtaaacttgattccttataacccagttagtgagcatgaccaatatagccgtagtcctaaagagcgcgtcctggccttttatgatacgcttaagaaaaaaggggttaactgtgtggttcgtcaagagcatggtactgatattgatgcagcttgtggacaattgcgttctaatacaatgaaacgtgaccgccagaaagcagtcgcagcagtcaatccttaatgatgaagaagacttataatcgtattttggtctggggagtcattttctatagtatttgtatcgtttacttttgctttactcctcaagaacattctcccgtgggggtggaaactccaggtattcagcatcttggacgcctggtttttcttttgactcctttcaattctctctggaaactgggtgaggtgagtgacataggacaattatgttggctttttctacaaaatatcctcaatgtcttcttactttttcctctgattttccaactcctttatctccttccaaatttgcgtaagacaagaaaagtgatctttttcagttttcttataagcctaggaattgagtgtacgcagttagtcttagattttttctttgattttaatcgcgtctttgagattgatgatttgtggaccaataccttgggtggctatctggcttggcttctctataaacaattacataaaaacaagataaggaattaaaatgagtattttagaagttaaaaatctgagtcatggttttggtgaccgtgcaatttttgaagatgtgtccttccgcctccttaagggagaacatatcggtctggtcggtgccaatggtgaaggaaaatcaacctttatgagcattgtgactggtaaaatgctgccagatgaaggaaaggttgagtggtccaaatatgtgactgcgggttacttggatcaacactcagtccttgctgaagggcagtcggtgcgtgatgtgctccgtacagcttttgatgagctgtttaaagctgaagctcgtatcaatgacctttatatggaaatggctgaagacggtgcggatgttgatgctctcatggaagaagttggcgaactgcaagatcgtttagagagtcgtgatttctataccttggatgctaagattgacgaagtagcgcgtgcccttggtgtcatggactttggcatggatacagatgtaacttctttgtcaggtgggcaaagaaccaaggtgcttttggcaaaactcctccttgaaaagcccgatatcttgcttttggacgagccaaccaactacttggatgctgagcatattgactggctcaagcgctatctccaaaactatgagaatgcctttgtccttatttcacacgatattccattcttgaacgatgttatcaatatcgtctatcatgtggaaaatcaacagctgacgcgttactctggtgactactaccagttccaagaagtctatgctatgaagaaatctcagctagaggcagcctacgaacgtcagcagaaagaaattgcggaccttaaggactttgttgcccgaaacaaagcgcgtgttgcaacacgaaacatggccatgtctcgtcagaagaaattggataagatggatattatcgaattacaaagtgagaaaccaaaaccatcctttgatttcaaatcagctcgtacgccagggcgctttatcttccaagccaaggatttgcaaattggttatgatcgtcctctgaccaagcctttaaatcttacctttgaacgtaatcaaaaggttgctattatcggggcaaatggtatcgggaaaacaactctcttgaagtccctattgggcattattccaccaatcgctggagaggttgaacgtggagactacctagaacttggctactttgaacaagaagtagaaggtggcaatcgtcaaacaccactagaggctgtttggaatgcctttccagctcttaaccaagcagaagttcgtgcagcccttgcccgttgtggtttgacaactaagcatatcgaaagccaaattcaggtcttgtcaggtggggaacaagccaaggttcgtttctgtctcttgatgaatcgtgaaaacaacgttttagtgctggacgagccgaccaaccatttggatgtggatgccaaggatgaactcaaacgcgctctcaaagaatacaagggatctatccttatggtctgccatgaaccagacttctatgaaggctggatggaccaaatatgggattttaataatctaacttaaaaatgaggacaaaaaaatacagtaccgaatgtggatactgtattttttggtttttaagatttaaaatcgtagtctttcaccacttcgatgctgtcgattgtgatagcagtagttggcttgtctttttcatctttttcggctttggcaattttatctacaacatccataccgtcaatcacttgaccaaatacggggtgtttgccatctagactagggtttcccccttctttataggcttcgatgattttctttggatacttgtttgtagggagtttagcagaggtatctgtagagttttggttgatgaagaattggctaccgttggtgtttggttgaccagtattagccatagaaagagcaccacggatgttatagagataaggagtaatctcgttcttgaaaccagttcccttatcttttgtcttatccttgtcatgccagatggactgaccacctgtaccgtctccctttggatctccagtttgaaccatgaagccatcgatgacacggtggaaggtaatgccgttatagtagccttctttggcatgagtgaggaagttttcaaccgctaaaggagcgagtttagggaagagtttgatacggatatctccttgatttgtgtggagaatcacttcagcttcatcttcagcaacttctttagatagttgtgggaaattggcgttttcgtttgttaaagcatcgtttaactccttggcagattgggcagctgctttggaactttcttcagcagcaagactggaatcaacatagtcatcaccacgcaaactacgttggatgttgctacatccagctagagctacagtggatagtaaaagaagtgttgctatttttttcattctattcctctcaaaaattcatttctaccattgtaccctaaaaggaaggggatttcaaatattagtgacaagacagtttaagaggaagctaaccagaaagtcgcttgcttaggggcatcaatgccataagtatactcaaagtattttggaaccagatcttaagaaagctcgtaaagcatcacaattagtaaacgttaattcgaaagaattactatattttaaaagagcacattttcaaaggattttttcttttgccttcaattcctaattaatcaatgaatttaatactaggtctcgaaaagaattatgcttcctctttctgtctgagttcaaagaggtcttctactttcagattaaaaacttgagcaattttaagagccatttctagcgaagggttgtaacgattattttccaagtgcagaattgtctcgcgtcgcatgccgatgcggtcggctaactcctgctgggtcatgcctgtggactcacgaacagatttgagattagtaataatcttgctttctttggccatgcttatcctctacgttccaagataaaatagacaaccgcaaagatgcaaatcaagacagctatgttaataaatatctgtcccatgtaaagagtgagagaccccatatacccaatgataactgctaggatcatcagtgcgcctagtataaaaacaaacatcaagctagctgccttggctaaattagcataaaagcgttcgtccggagtttccttgacattttttaaagagaaaaaaccaaatataatcacttcaataacgaggctaattcccaaaatccattctttaataccagaacttacgctaggggtcgcaacccaaattcctactgtataaaaaatgcttgctgcaaacacaagtatcgtgtaaagcttagcagacaagtcaaaaataatctttcccttacctttctgactcttatgtagccagctacaaatagctacaatttgacctgtcactgaaataccagtaataactaacttgggtccccaactaagattagaaccaaataaaacagtaaaatcaataaagagagctacggcaatcactgcaatgaggccacgcattttttgattttttttcatgatagactccttttttattttataaatatataacacttaaattttatgttataaatatatcacatttaaatttagaaagcaagaatttatgtgccaaggtggcaattatttggaaaatctagatactctatgaatctctacttttttcttagactgttataaagtctgtcagaataagctttgtaggtgtagaagttagtttttacagaactaaattattctcctatttagaatctattaattcatattttataaattaattagtagatatcgttcttaaaatccttgatatttcgtttgggaacgggcttaggatttaggagccaagtattcaaatctcgttcaggcgatatgaagggtttgacttggtggtctttataaaatgtttctaaaaaaggattcatgacattctctttctgatttttctttaaaaatataacaaatttctaaaaggtttaagaattttatagtctgtcaagtttttttcttgacacctgccagaaatctgctataatagaacatgtgctaaatagcttagctatttcaccgaaataaaaaataagaaaagagactttaaaaatggcagttaaaatccgtttgactcgtatgggttctaagaaaaaacctttctaccgtatcaacgtagcagattcacgttcaccacgtgacggacgtttcatcgaaacagttggaacttacaacccacttgttgctgaaaaccaagtaactttgaaagaagaccgcgttcttgcatggttggctgatggagctcaaccttcagatacagttcgcaacatcctttcaaaagaaggtgtattgaagaaattccacgattctaaattctcaaaataagtttaaagtaggttgacagatggatacgattgaaaatctcattattgcgattgtgaaacccttgatttcacaaccagatgccttaactatcaagattgaagatacaccagagtttttggaatatcatttggatcttgatcaaagcgatgtgggtcgtgtaatcggtcgtaagggtcgcactatttctgcgataagaacgattgtctactctgtcccaactgaagacaaaaaagtaagaatcgttattgacgaaaaataagaagggcgggacggatgtctcgctttttttgtgtggagaagtgtaaaatagcatccatcaagtaacagcataatcgggatttggaaggatttttgaagggggactggaaaagaatgaacattgattgtattttaaacatagattgggcaatgtacattgattggttattgcgaattttacagatttcgacttttataggtgtaattttaaaaattagttttcagaataaggcctatatcaataatatcgaaattcaggtaattaaaccaatcgaatttgattccttacatacgagatttcatcatatatatgagtttaaacatgatgaaaatgataaacattataaccatttgattttttatccaaaggaagttgatattgaaattatagaattttattctttaatctatgattcaaaaagtaatcgtttagttgataatgataaactgcatacagttaaaaatttaaagaattatacatgcttattgattcatacaaatttaccagagaatatgcctagtttaagaatgaaatggaaaacaagtcagggtgaaattggcgagtatacattttatagtaatatgtataatgggaatgtgaatatctcatctttcaaatataaattaacattaaagaggaaactattagcactttttggactatagcgacccctctatgtatcttcctccaacttgagaaaatccttggaacgtgttaaaataaaggataaggatttttaataattcattatatagaacgagtggatttctttatgaagaggattgaagtatctacagaaattggtagtctctctgttacttatcaaaagcaaaagaaaatgctagtttgtttaagtggcgcaggtttgctaccaagttatgaaaatttttcacttatacttgaaaaacttcctcctacaattggttatttgactattgattttccgaacacaggtaggagtccgatgaatgaccaagctggaaaaaatctggataatcttgcagatgcagtttatgaagtacttgaagaattggcgatttctgaatatatactttgtgtacatagtttgagtggaattttagcttgtaaattgctcaagaaaccaattaagtgtcaggctttagtagcaattgaaccgacaactaaaaacgtcatgtttgctgatttttcagaaaattcttatccagaaatggaagagcagatgaggctgattgacgagtgtggtcctgaactttattttaagaacttaactcaagcaacatttagacctgaaattaataaagaaatctgggaaataatgcagggaaaaggctcagagttggaaaatcaagatccaggatttcaaatatctggagagattactgaggaagattttgagaatttgtcgatagaaacttgtacccctgtatttattttttgtcagccttatagagaaaaagagtacagagaatcagaatattggacttccaatactaaactcattttaggagggaatcaccattatttacaatggtcagaatcagaaaaaattgcgactattattcgagaattgttagaataagatggatagaaataaagtacaggagacaagatgaactactttaatgttgggaaaatcgtcaatacgcaaggattgcagggtgagatgcgagtcttgtctgtgacggattttgcagaagaacggtttaaaaaaggtactgagctggctttgtttgatgaaaaagatcagtttgttcaaacagtgaccatcgctagccaccgtaaacagaagaactttgacattattaaattcaaagatatgtaccatatcaacgctatcgaaaagtacaagggatacagtctcaaggttgctgaggaagatttgaatgacctagacgatggtgaattctactatcacgagattatcggtttggaagtctatgagggtgataacttgattggaaccatcaaagaaatcctgcaaccaggtgctaacgatgtctgggtggtcaagcgaaaaggcaagcgtgatttgctcttgccttatatcccaccagtgattctcaatgttgatattccaaataaccgagtcgatgtggaaatcttagaagggttagacgatgaagattgatattttaaccctttttccagagatgttttctccgctagagcactcaatcgttggaaaggctcgagaaaaggggctcttggatatccagtatcataattttcgagaaaatgctgaaaaggcccgccatgtcgacgatgagccctacggaggcggtcaggggatgttgctccgagcccaacccattttcgatgcctttgatgctattgaaaagaaaaatccgcgcgtcattctcctcgatcctgctggaaagcagtttgatcaggcttatgctgaggatttggctcaagaggaagagttaatctttatctgtgggcactatgagggttatgatgagcgtattaagaccttggtgacagatgaggtttctctgggagactatgtactgactggtggtgagttggcagctatgaccatgattgatgctacggtacgcctgattccagaagtgattggcaaggagtctagccaccaagatgatagtttttcttctgggcttctcgaatatcctcagtacacacgtccctacgattatcgaggtatggttgtgccagatgtactgatgagtggacaccatgaaaagattcgtcagtggcgcctgtatgagagtttaaagaaaacctatgaacgcagaccggatttgcttgaacattatcaactgacagcagaagaagaaaaaatgctggcagaaattaaagaaaacaaagaataaaggagatacctatgcaagtaatcaaacgtgatggagaaattgctgaatttaatccagataagatttaccaagctatcttaaaagcagcccagactgtctatgtattgacagatgatttacgtcaaaaccttgcacaagtcactaagaaagtggttttggatttggaagaggccaaggtggaacgtgcgaccatcagcatgattcagtctttggttgaacatcgtttactgggtgcaggttacattaccattgcagaacactacatttcctatcgtctacaacgtgacttggaaagaagtggttatggagatcacatcgcggttcatttacattttgaacaaattcgctaagaaaaaagagtgggatgaagcaactacatctcactctttcttaaatctatttttttgggctgtttggacagttgaagggacaaatcgcaggcgttgaatatcgcttatacggataatacgggtcacatttttggcaaaatttttcacaataatttgctggcgttgttgatcgtatttgatgatatcacctgtaaaacttgtctcagacaagataaggtgaacagcggtttgtttctggatagcctcttcaatagtagctgtaagggagttgctttcagtctggtctggttcttcatgtccatttaaaaagtcatgtattttatctagaacttgctggaatttatgtctcatagtggcctcccttcttttatatcaatattatataaaattttcctaaaatctacaagattttacgaataaactaatgaaagctaaaaaaggagaagaaaatggcagaatttacatttaaaatcgaagagcacttgttgactctttctgaaaacgaaaaaggttggactaaggaaatcaaccgtgtgagctttaatggtgctcctgcaaagtttgatattcgtgcttggagcccagatcatactaaaatgggcaaaggaattactctctcaaatgaagaatttcaaacaatggtggatgcctttaaaggtaactaagttgtcaaaataaaagaaaaggatattgagtcatgacaactcgatatccttttttagttagtaaagtaagcctgatttttaaggcgttgaagtaggggacgactaataaaactaatagccagaagtttaccaaggtctggaatgataaagggaatgacccccacaacaagagctttttcaaatgccattccagccaggaaatgcaagctgagaatcccgccgacaaagacaagggcatcacccaagaggtttgctagaaaaattctgacaaaaccactatcactgttagttagagaagaggtaagtccagaataaacaagataaaaccaaagatagcccgcagtagggccaactaaagcctgaaatccggctccacctcctgcaaagacaggaagaccgattgcacctagaagaagatagagtccaacagaaagtacagcctctctaggtctaaggacagtagcaatcaagccgattgcaaagttttgcagagtgaagggaacaggtccaattggaagactgatttgtgccaaaacagcaatgagagcagccccaatagcagggatagcataaacgtgagcttttttcaaaatagttaacctcttttctgatgtatagtaactattatactcgtggagcaattattgtcaaccaattttttaaaataaggtaacaaaaactgtaacggccgatttgctgactgggtaagttgttttcatcatttcgtaaaacatcaaaaaagaagcagacacatttgtatcggcttcttttttttcgattaacgcatagttacaaattcttcagatgcagttgggtgaatcgccacagttgcgtcaaagtcggccttggttgctcccattttgatagcaacagcaaatccttgaatcatttcatcaacaccatagccaattccatgaagtccgacaactttttcttctgaaccagctgtaatcaatttgaaacgagtttcttgacggttgtcagtgcaagcagagtacatagacgtaaagcttgatttgtaaaccttgatttggtcttgaccgtattctttaatagcttgctcttctgtcaaaccaacagttccgatagcagggtgtgaaaagacgacagttggaatagttgagtaatccatttttgcagtagtttttccgttaaagagacgttcagatagggtacgtccagctttgatagcaactggagttagttctttttcacctgttacatcacctagagcgtagattccttcaataacagtattttggtattcatctacttggataaagccacgttcgttcagagttactccagctttttcaagttgcaagcccttaacgtttggacggcgaccagtagcccagataacttgactagctgtgtgactagtaccatcttcgaaatgaatggtaatgccttcagcagttttttctaacttaacagggactttgtgagtgtgaagtggtaagtttgttctttccatttccttgaccagaccttcaacgatgtaagaatcaaaaccacgtaaaggacgatcacggcgaacaaagaggtctgtcttgacaccaaaagtgtggagtacgccagccaattcaacggcaatataaccagcgcctagaatagcaactgactctggcaattcttcccaagcaaatacatcatcagaagagccacctagttcagcaccaggaacgtttggaatactgggatgggcaccagtagcaatcacgatatgttagcacgaatcagttcaccatttacgctgacagtatgagaatctacaaattcagcatgaccttcaatcaaatctacaccgttgcgtttaaaactgccatcataagaagaacgagcgcgatcaatgtaggcttcacgattgcgacgtagggtagcgaagtcaaagttaagatcagtagtcttaaagccgtagtcttctccaaattgatggaaagtytcagcgatttgtgctccgtaccacatgatttttttaggaacacaaccgacgttgacacaggttccacctaatttcttttcctcaataacggctgctttggctccatgttcaccagcacggttcatagtagcaattcctccgctacctccaccgatagcaatgatatcatattctctcattaaaaactcctttgtactcttttaaatagtagagtgtcattttttgatagtcatattctatcttttttttgatgtgattgcaaaaatctgctacgttaaaaaaaattaaagaaaaggcttgcaaaaaagaaaaataaagtgtattatataactagtacaatgataataaaaataaattccgaacaataagtgaatcctgaaatgtcattatttcgttctgaactgttattgtttatattttgtaatttttgtataatattgttaagtactttaaatcaaaaaggagtttcattatgaaaaagaatcgtaaagctaaaaagtggcaattgtatgcagcaattggtgctgcaagtgttgttgtattgggggctgggggcattttgctctttagacaaccttctcaaaactgctgtaaaagatgagccaactcatcttgttgttgctaaagaaggaaccgtggcatcctctgttttattatcagggacagtaacggcaaaaaatgaacaatatgtttattttgatgctagtaagggagatttagatgaaatccttgtttctgtgggggataaggttagtgaagggcaggctttagtcaagtacagtagttcagaagcccaggcggcctatgattcagctagccgagcagtagctaaggcagatcgtcatatcaatgaactcaatcaagcacgaaatgaagccgcttcagctccggctccacagttaccagcaccagcaggaggcgaaggagctgcagggcaaactccagctccagtctcaggaaatgcagtttcatctattgatgcacaactaggtgatgcccgtgatgctcgtgcagatgcagaagcgcaattaagtaaggctcaaagtcagttggatgccatgacggttctcagtaccctggagggaactgtggttgaagtcaaccacaatgtttctaaatctccaacaggagctagtcaagtagtcgttcatgtcgtaagtaatgaaaacttgcaagttaagggtgaactatctgaatataaccttgccaacctctctgtaggacaagaagtaacctttacttctaaagtttaccaagataagagctggacaggtaagattagctatatctctgactatcctaaaactagtggtgaagcagcaagtgcagctactgccgcaacaggtggtaattctggttctaaatatccatataccatcgatgttacaagtgaaatcggtgatttgaaacaaggattctcagtaagtgttgaggttaagaataagagtaaagccattttggttcctctaacaagtgttgtgactgaaaatgataagaactatgtctgggtgcttgacgagcagaaaaaggccaagaaagtggaagttggtttgggcaatgctgatgcagacaaccaagaaatcacttcaggtctgacaaatggagtcaaggtcatcagtaacccaacgtcttctctagaggaaggaaaagaggtgaaggctgatgaagcaactaattagtctaaaaaatatctgcagaagctaccgtaacggtgaccaagaactgcaggttctcaaaaatatcaacctagaagtgaatgagggtgaatttgttgccatcatgggaccatctggttcgggtaagtctactctcatgaatacgattggtatgttggatacaccaaccagtggagaatattatcttgaaggccaagaagtagctggacttggtgaaaaacaactagccaaggtccgcaatcaacaaatcggttttgtctttcagcagttttttcttctatctaaacttaacgctctgcaaaacgtagaattgcccttgatttacgcgggagtttcggcttcaaaacgtcgcaagttagctgaggagtatttagacaaggttgaattgacagaacgtagtcatcatttgccttcggaattatctggtggtcaaaagcaacgtgtagctatcgcgcgtgccttggtaaacaatccttctattatcctagcggacgaaccgacaggagccttggataccaaaacaggtaaccaaatcatgcaattattagttgaactgaataatgaaggaaaaacaattattatggtaacgcatgagcctgaaatcgctgcttatgctaaacgccagattgtcattcgggatggagttatttcgtctgacagtgctcagttagaaaaggaggaaaactaagatgcagaatctgaaatttgccttttcatctataatggcccacaagatgcgctcttttctcactatgattgggattatcattggtgtttcatctgttgttgtgattatggctctgggagattccatgtctcgtcaggttaataaaaatatgaccaagtcacagaagaatatccatgtctttttctcgcctatcaaaagcaaagatggttcttttacccaaaagcaatcagctttgacggtttctgggaaagaagaggatgttcctgtggagccaccaaaaccacaagaagcttgggtcaaggaggctgctaaagttaaaggggtggacagttactatgtaaccaactcgaccaataccaccctgtcttataaagacaaaaaagtggagcgagctagcttgacaggtggaaatattacttacatgaaggcggttgaaaatgaaattgttgcaggccgcagtttcatagctcaggattataaagatgtggccagtgtcattttactagaccaagaacttgctaatagtctgtttggatctgctcaagaagctgttaaccaggttatagatgttggtggctttagctatcgtgtcattggtgtctataccagcgatgaggccaagactgccaagacttttggtattggtggacttccgattacgactaatatttctcttgccaataacttcaatatggatgaaatttctgatattgttttccgagttaatgataccagtttgacaccaactgtaggaccagaattagctagaaaaatgaccgaaattgctagtcttcaacaaggagagtatcaggtggcagatgcgactgcagccttccaagaagtacaacaactttttggatttataactacgattattagtgccattgcaggaatttccctttttgttggaggaactggtgttatgaacatcatgctggtttcggtgacggagcgtacgcgtgagattggtctccgtaaggctttgggtgcaacacgtgccaatattttaattcagtttttgattgaatccatgattttgaccttgctaggcggagttattggtctaaccattgcgacaggcttaacagctatagctggtctactcttgcaaggattgatagcgggtatagaagtaggagtatcaatcccagttgccctatttagtcttgcagtttcggctagcgtgggtatgatttttggagttttgccagccaacaaggcttcgaaacttgatccaattgaagcccttcgttatgaataagttaaacaagatggacactcgtctatcttgtttttgtatggatttccctatcgaaaatcagtaaaaatgtgatataatgaagtgttagaaaaacaggtttcatttgcctggaaaggaaaaattatgtctgaaaagaatttttatattacaacaccgatttactatccatctggtaaacttcatatcggttctgcctacacaaccatcgcttgtgatgtcctagcacgttacaaacgcctgatgggctacgatgtcttttatctgacaggtcttgatgagcatggtcagaaaatccagcagaaagctgaagaagctggcatcacacctcaagcttatgttgatgggatggcagttggagtcaaagaactctggcaattactggatatctcatacgataaattcatccgtacaacggatgattaccatgaaaaagttgtcgcacaagtctttgaacgcttgctggctcaagatgatatttacttgggtgaatactctggttggtattcagtatcagatgaggaattctttacagaaagccagcttgcagaagttttccgtgatgaagctggaaatgtgacgggtggtatcgctccatcaggtcatgaggttgaatgggtttcagaagaatcttacttccttcgcctcagcaaataccaagaccgtctagtagaatttttcaagtcccatcctgaattcatcactccagatggtcgtctgaatgaaatgcttcgcaacttcatcgagccaggtttggaagatttggcagtttctcgtacaacctttacatggggtgttccagtaccatcaaatccaaaacacgttgtctatgtttggtttgatgctctgctcaactatgtgacagctcttggctacgatcaagacgaacacgctaactttgacaagttctggaacggaacagtcttccacatggttggaaaagacatccttcgttttcactcaatctactggccaatccttcttatgatgttggatatcaaattgccagaacgtttgattggtcatggttggtttgtcatgaaagacggtaagatgtctaagtctaaagggaatgttgtctatcctgaaatgttgatagagcgttttggactagatccacttcgttactacctcatgcgcagccttccagttggttcagacggaacctttactcctgaagactatgtaggccgtatcaactacgaattggccaatgaccttggaaacctcctcaaccgtacggtttctatgattaacaagtactttgatggtcagatccctgcctatgtagagggtgtgacagagtttgaccatgctcttgctcaagtagcagaacaatcaatcgcagactatcatacacacatggaagcagttgactacccacgtgctcttgaagcagtctggactctgatctctcgtaccaataaatacatcgatgagaccgccccatgggtcttggccaaggatgaagctctccgtgaccaattagcaagtgtcatgagtcacttggcagctagccttcgtgtcgttgctcacttgattgagccgtttatgatggaaactagtcgtgcagttttgactcaacttggtttagcagaagttgctagccttgagaacttgaacttggctgacttcccagcagatgtgactgtagttgccaaaggaacaccaattttcccacgtctcgatatggaagaagaaatcgcctatatcaaggaacaaatggaaggcaacaaaccagcagtcgaaaaagagtggaacccagacgaagttgagctcaaactaaacaaggaagaaatcaagtttgaagactttgacaaggttgaaatccgtgtcgcagaagtcaaagaagtgtctaaagtagaaggttcagataagttgcttcaattccgcttggatgctggtgatggtgaagatcgtcaaatcctctcaggaattgccaaatactatccaaatgaacaagaattggtcggcaagaaagtccaaattgttgctaacctcaaaccacgtaagatgatgaaaaaatatgtcagccaagggatgattctctcagctgaacatgatggaaaattaacccttctcacagttgatccagctgtaccaaacggaagtgtgattgggtaaaaatagacaggactagttcatgctagttctgttttttatttaactattatgctttacaaactagtgtgaaagtggtatattataaatgaagttactagtaggtattacaaaatagattagaagggagaagtgatgaaagaaactcagctattaaaaggtgttcttgaaggttgtgtcttggatatgattggtcaaaaagagcggtatggttatgagttggttcagactttgcgagaggctggatttgacactatcgttccaggaactatttatcctttgttgcaaaagttagaaaaaaatcaatggataagaggcgacgtgcgcccgtcgtcagatggtccagatcggaagtatttttcgttaactaaagaaggagaagaacgtgtctcagtcttttggcaacaatgggacgatttgagtcaaaaagtagaaggaattaagaatggagggtaaaccataaagaaaatgaagtattatgaagaaacaagcgctttgctacatgagttttctgaggagaatcaaaagtattttgaggaactgtgggatagttttaatcttgctggatttctctatgatgaggactatctcagagagcagatctatttgatgatgctagatttctcagaagcagaacgagacgggatgagtgcagaggattatctaggtaagaatcctaaaacaataatgaaagagatgctcaaggaagcacctcgcagttctatcaaagagtcccttttgacgccaattcttgtcctagcggtattacgctactatcaactattaggtgattttctaaaggtcctctcttaacagtcaatttgcttacgtttttaggccaacttcttctttttctggtcggatttgggcttgtggctacaattttacgaagaagtttagtccaagattctcctaaaatgaaaattggtacctatattgtcgttgggattcttgttctgctagttgttctgggatatgtaggaatggcaagcttcatacaagaaggagccttttatcttcctgctccctgggatagtttatctgtatttacgatttcgctggtcatcagtatttggaattggaaagaaccgatttttcgtccctttgtcagtatgattgttgcccaccttattgtaggttctctgctccgttactatgagtggatgggcatttcaaatgttttccttacaaaagtcatacctttagctgtcctctttattggaatctttgtcttgttccgtgggtttaagaagataaaatggagtgaaatatagtcaaaaagccgttgcaaagcggttttttgttataatgaagggaagaatgttagaaattaaaggagaaaaatttgatgagatacataactcttggtcaagatgacaaagaattatcagaaattgttctcggaatgatgagaataaaagataagtctgttagagaagttgaagagcttgtagaaacagcactttctgttggaatcaatgcttttgacttagctgatatatatggtcttggtcgttgtgaagaactgttaggtcttgtcctaaaaaatcgtccagatttaagagaaaagatgtggattcagtccaaatgtggcattcgcattgaagaatttacctattttgatttttcaaaagagtatatattacaatcagttgatgggattttagaaagattgcaggttgattatttagatagcttgcttcttcatcgaccagatgctttgatggaagctgaccaagtagcagaagcctttgatatcctttataaacaaggtaaggttcgaaattttggagtttctaatcaaaatcctatgatgatggagttgcttaaaaaagatgtcaagcagccgttagctgttaatcagctacaattgagtgtggcttttacaccaggattcgaatcaggttttcatgttaatatggaagatagtcaagcagctatgcgagatggcagcatttttgaatattgcaaattacacgatgtggtcattcaagcatggtctgtcttacaattcgggtatttcaaagggaattttgttggaaatgagaaatttcaagctttaaatcaagtacttgatcgtttagctactaaatatggagtaacctcttcaactattgccatttcttggatattgcgttatccagcaaaaatgcaggcagtcgtaggcaccacaaatcctaagcacttgagagaagttagccaagcgggaaactttagcttaacaagaaaagaatggtatgaaatttatcttgctgcagggaataatttgccgtaagtagaagcagatgtaaataaatcacagtcaaaaagctgttgtaaagcggttttttgttataatgaaagggagaattattgatattaaaggagaaaaaaatgacatttgaagagattctgcctggattgaaggctaagaaaaaatatgtacgtactggttggggaggtgcggaaaactatgtgcagctttttgacaccattgaacaaaacggggttgctcttgaagtgacaccttatttcctaatcaacgtgtctggagaaggagaaggtttttccatgtggagtccgacaccttgtgatgttttggcgacggattgggtagaagtgcatgactagacgtgtattgattacaggagtgagttcagggatcggcctagctcaagctcgcctctttttagagaatggctttcaagtttatggagttgaccaagatgaaaatccgctcttagagggtgatttccacttttttcagagagatttgaccttggacttggagcctatttttgactggtgtcctcgggtggatgttttgtgcaatactgctggagttttggatgcttacaaaccacttttggaacaatcagcgcaggaaattcaagagatttttgaaatcaactatgtgactcctgttgagttgactcgctattatttgacgcaaatgctggaaaataaaaaaggaatcattatcaatatgtgttctattgcttcgagcctagcaggtggcggtggacacgcctatacttcttcgaagcacgccttggcaggatttaccaagcagttggctctagactatgcgggagctgggattcagatctttggtatcgctccaggagcagtcaagacagctatgacagctgacgactttgaaccaggtggcttagcagactgggtggctagtgaaacgccaatcaagcgctggattgagccagaggaaatagcagagattagccttttcttagccagtggaaaggcctctgccatgcagggacaaattctgacaatagatggtggctggtctttgaagtagggagaataaagttaataaaaaggagcacccatgacaccgcaagaaatgtggaatgcatacaagaaaattgatccctctatcggagatgaggtagatgcctgggcttttggagtggaaacagatctcttggcagatttggtgtttaaaggcgaaaagacagcaaccgcctcagcctacgacctctacgcactagaagacgaacctcttccacaagaagggaccttcgatgttattttagatagtcaaaatcaggctgtctgcattgtcgaaattacaagggtttccgttcagccctttaatcaagtttctgcgcaacatgcctataaggaaggtgagggagacaaatctttgacctattggcgtcaggttcatgaggcttgtttcgccgagtggctgagagaagcaggactgacttttacacctaacagcaaggtcgttttagaagaatttcgcaaggtctacccactgtaggctattagaaggaagaaagttttggaaatcaccgtccaatccttttttctcaagcaaaacatgatataataagtttgtttgaagaagagctctagctcttaaacttagaataggagaaaactatgcaagcagttgaacattttattaagcaatttgttcctgaacattatgatttatttttagacttgagtcgtgagaccaagactttttctggaaaggtgactattagtggtcaggcacagagtgaccgcatttcccttcatcaaaaagacttggcaatctcttctgtagaagttgaaggggaagctcgcccatttacagttgatcatgacaatgaagctcttcatattgaattagctgaggctggtcaagttgaagtggttatcgctttctcaggaaaaattacagacaacatgacagggatttacccatcttactacacagttgatggagtcaagaaggaagtcttgtcaactcagttcgagagccattttgcgcgagaagctttcccatgtgtggatgagccagaagccaaagcaacttttgatctagctcttcgttttgaccaagctgaaggtgaattggccttgtctaacatgccagaaatcgatgttgaaaaccgtaaggaaacaggtatctggaagtttgagacaacacctcgcatgtcttcttacttgttggcctttgttgcaggtgatttgcaaggtgtaacggctaaaactaaaaacggtaccctcgtaggtgtttattcaaccagagctcatccactatcaaaccttgatttctcactggatatcgctgttcgctctatcgagttttacgaagattactatggagttaagtacccgatccctcaatctctccacatcgcccttcctgacttctcagctggagctatggaaaactggggtctcgtgacctaccgtgaagtttacttggttgtcgatgataactcaacttttgctagccgtcaacaagttgcccttgttgtggcacatgaattggctcaccaatggtttggtaacctggtaactatgaaatggtgggatgacctttggctcaatgaaagcttcgccaacatgatggagtacgtctgtgtggatgctattgaaccaagctggaatatctttgaagatttccaaacaggtggtgttccgtctgccttgaaacgtgatgcgactgatggtgttcaatctgttcacgtcgaagtgaaacatccagatgaaatcaatacgctctttgacggagctatcgtctatgccaaaggaagtcgccttatgcatatgcttcgtcgttggctaggtgataccgattttgccaaaggtttgcatgcctactttgaaaaacatcaatacagcaatacaattggtcgtgacctttgggatgctcttggtcaagcgtctggacgtgatgttgcagccttcatggattcttggttggaacaacctggttatccagttctcactgtcaaagttgaaaatgatgtcttgaagatctcacaaaaacaattctttatcggtgagcacgaagacaagaaccgtctctgggttgtgccactaaacagcaattggaaaggcttgcctgatacactcgaaactgaaagcatcgaaatccctggctatgcagcccttcttgctgaaaacaaaacagcacttcgtctcaacactgaaaatacagcccactacattaccgactatcaaggagatttgttggatgcagttcttgctgacctagttgagcttgataacacaagtaaactgcaaatcgtccaagaacgtcgcttgcttgctgaagcagggcacatttcttatgcagacttgcttccagtccttgataaactcgctaaagaagaatcttaccttgtcgtttcagctgtttctcaagtaatttctgcccttgagcgctttatcgatgaaggaacagaagctgaaagagccttcaaagccttggttgctaaattggctcgtcataattatgaccgtcttggttttgaagctaaagatggcgaatcagatgaggatgaattggttcgtcagttggccatttctatgatgattcgctcaaatgatgcagaagctagtcaagccgctagccaaatcttcgcagcacacaaggagaatcttgcaggactcccagcagctattcgttcacaagttctcatcaatgagatgaaacatcatgagactaaagacttgttagcactttatcttgatacttatacgcacgcaacagatgctgtctttaaacgtcagttggcagcagctcttgcctacagtaaagatgcggacaatatccaaaccttgattacttcttggaaggacaaatttgtggtcaaaccacaagacttgtctgcttggtacttccagttcttaagccatcaagcaactcaggaaacagcatggtcttgggctcgtgaaaattgggcttggattaaggcagctcttggtggagatatgagctttgatagctttgttatccttcctgctcacgtatttaagactcagcaacgcttggcagagtacaaggaattctttgaaccgcaactttctgaccttgctcttagccgtaatatcggtatgggaatcaaggaaattgcagcgcgtgttgacttgattaaccgtgaaaaaactgcagtggaagcagtcgttcttcaatacggaaacgcataaataagcctaaaataaaaagaaaactcagctatctcatgtaaaatgtagagagttgagttttttttaaggcaaatttggtataatggttttaataaggaggagtttctcatgataaaaatcttattagttgaggatgacctaggcctgtcaaattcagtatttgactttttagacgattttgcggatgtcatgcaggtatttgatggtgaagaaggtctctacgaagctgaaagtggcgtctatgacttgattttgctcgatttaatgttacctgaaaaaaatggctttcaagtcttgaaagaattgcgtgaaaaaggaattacgacaccagttctgatcatgactgccaaggaaagtttggatgacaagggacatggatttgaattgggagcagatgattatctgaccaaacctttctacctagaagaactcaaaatgcggattcaagcgcttctcaaacgttcaggtaaatttaatgaaaacaccttgacttatggaaatattgtggttaatttgtcaaccaatactgttaaagtcgaagatactcctgtcgaattgctaggtaaagagtttgatttattagtttatttccttcaaaatcaaaatgttattttgcctaagactcagatttttgatcgtctatggggatttgatagtgacacaacgatttcggttgtcgaagtctatgtttcaaaagtccgtaagaaattaaaaggaaccacttttgcagagaatttgcaaaccttgcgcagtgttgggtatattttaaaagatgttcagtaaactaaaaaaaacatggtatgcggatgactttagttattttatccgtaactttggtgtattcactctgattttctctaccatgactctgattattttgcaggtcatgcactcgagtctttatacttcggtggatgataagcttcatggactaagtgaaaatcctcaagcagttattcagcttgctgtaaatagggcaacagaagagattaaagatttagagaatgccgctacagatactagcaagactgagataaaacccaatgtcagttccaacacagaagtcattctttttgataagaattttacccagctcctttctggaaatcgatttttgggattggataagattaagttagagaaaaaagaactaggacatatctatcagattcaggtttttaatagctatggacaagaagaaatctatcgcatgatcttgatggaaacgaatatcagttcggtttcaaccaatatcaagtatgcagctgtcttgattaataccagtcagttggagcaggctagtcaaaagcatgagcaattgattgtgattgtgatggctagtttctggattttgtctttacttgccagtctctatctagctagggtcagtgttcggcccctgcttgagagcatgcagaagcaacagtcctttgtggaaaatgccagtcatgagttacgaactccacttgcagttttgcaaaatcgtttagagaccctttttcgtaagccagaagcaaccattatggatgtgagcgaaagcattgcgtctagtttggaagaagtccgaaatatgcgttttttgacgacaaacttgctgaacttagctcgtagagatgatgggattaagccggaacttgcagaagttccaaccagttttttcaatacgactttcacaaactatgagatgattgcttctgaaaatgaccgtgtctttcgttttgaaaatcggatccatcgaacgattgtcacggatcaacttcttttgaaacaactgatgaccatcttatttgataatgccatcaaatatactgaggaggatggtgaaattgattttatgatttcagcgactgatcgtaatctgtatttacttgtttctgacaatggagtcggtatttccgcagaagataagaagaaaatatttgaccgcttttatcgagtggacaaggctagaacccgccaaaaaggtggttttggtttaggtttatccctagccaagcaaattgtagatgccctaaaaggaaccattactgttaaagataataaaccaaagggaacaatctttgaagtgaaggtagccatccacacaccatctaaaaagaaaaaataaaaatatcgctccagttggggcgatattttggatttatcttctacgttttcgtttgataatagaccgttgaacttttaaaacaagtaagctggatccgattgctgcggcaaaggcaagagcaggtgataattttaatgctaaaaagataaaactaaagatagcaatacagatacaaaaaacagcgatattaacaaaaaataggatttccttgagattggcatcagattgtgcttcaggtgtataatcttgatagcgaggaacctgctggcttaattcttcttgattgtctacctcataggattgtaattttcttacgggcattattctctccttaacagtacatacctattttatcattttttcagcagagaattattacagaaaggttacaataagaataaagtcccttttcatttttaaagaatggctgattttccagaaatgtggtataatttttcttatggaaaagattatcattacagcaactgctgaaagtattgaacaagttgaacaactgctcgaagctggcgtggaccgtatctatgttggtgagaaagattttggccttcgtctgccaacgacctttagtcatgaccaattgcgtgaaatcgctaatctggttcatgatactggtaaagaattgatcgttgcggttaatgccctcatgcaccaagatatgatggaccgtatcaagcctttcttagactttttggaagaaatcaagacagactacattacgattggggatgcaggtgtcttttacgtagtcaatcgcgatggttattcatttaagactatctacgatgcctcaactatggtaactagcagtcgtcagattaacttctggggacaaaaggctggcgcatctgaggctgttttggcacgtgaaattccatcagctgaactcttcaaaatgccagatattttggaaattcctgctgaagttttggtttacggagctagtgttattcaccattctaaacgtccactcttgcaaaactattataactttacacatatcgatgatgaaaagacccgcaagcgtgacctcttcttggctgagccaagtgacccagagagccattattctatctttgaagacaatcatggtacccacatctttgccaacaatgaccttgatttgatgaccaaattgacagaattggtcgagcatggtttcactcactggaaactagaaggactctacactccgggacaaaactttgttgagattgcaaaactctttatccaagcgcgtagcttgatccaagagggcaactttagccatgaccaagcctttttgctggatgaggaagtacgtaagttacaccctaaaaaccgtttccttgatacaggattttatgactacgatcctgacatggttaaataaagtaaactgcaagttgagagaaggaagatgcaaagatttcttctctcaattttttcttatttcttcaccattttcaaagaatcagtaggataggatgctctatttgatgggatttttaagacaagtagtgttcttgagtttgaaaattatcccatgtttgcaggtgccaaatggccctttttttggtataattttttataatgaaaacgattggtaatcgctatgttgtggttgatttagaggcaactagcacaggtagtaaggctaaaattatccaagtgggaattgtcgtgattgaggatggaaaaatcgtcgatcactatacgacagatgtcaatccacatgaacccttggatgctcatataaaagaactgacaggattgacagaccaacgtctggcgcaagcacctgatttttcgcaagttgctagaaaaatctttgacttggtggaggatgggatttttgtagcccataatgttcagtttgatgccaatctcttggcggaaaatttattttttgaaggctatgaactaagaaatcctcgtgttgacacggtcgaattggctcaggtcttttttcctaaactggaaaaatatagtttgccgatattgtgtcgagaattaggaattcctctaaaacacgctcacacagccctttcagatgcccaagctactgcggaattactcttatttctacaggaaaagatggcccagcttcctaaaggtctcttggaacgcttgctggaaatggctgacgccctcctatacgagtcctacctgcttattgaagaaatttatcgaaacaaatctatcctgagttcaccagacttggtcgaagttcaaggactgtatttcaagaaaactggagctcccctggagccacgaaaactatcccaagatttttctaaaaatatttctctgttaaatcttgaagtgagggaggagcaagaaagttttgctaaagaggttggcttgctattgaaagatgagcctgtctctctgattcaagctccgacagggattggtaaaacttatggatatctcttacctgctttgtcccaagtggaaaatcgtcagattgtccttagcgttccgacaaagattcttcaaaatcaaatcatggaagaagaaggtaaacgtctcaaggaagtgttccatatagatattcatagtttaaagggaccacacaattatctgaagttggatgccttttatcgttccttgcaggaaaatgatgaaaatcgcttatttagacgctttaaaatgcaactcttgatctggctgactgagacagagacaggagatttggatgaaattgggcaactctaccgttaccaacattttctaacagaccttcgtcatgacgggaatttatcatctcaaagcttatttgtgacggaagatttttggaaacgtagtcaagaaaaggcacaaacctgcaagcttttagtgaccaatcatgcctatcttgtaactagactggaagataatcctgaatttgtcagtgaccgtttattgattattgatgaagttcaaaagattttgttagctctagaaaatctgcttcaagagacttacgatgtccagtctattatcgatttgcttgataaggctttactggaggagcaaaataaggtccaacaacgaatactagaaagtattcgctttgagtgcctctacttgatagaacaatttcagtctggaaaatctaggaaaaatatcttggattctctgaccaatctccaccagtatttttcagaattagaagtagaagactttgaggagctggttcgctattttacagctgaccgagattactggcttgaagcaattgaaacgagtcaaaagaaaattcaaatttcctctacgaaatcaggacgtattctcctatcttctttagtacctaattcatgtcaagtcttgggagtgtcggctactcttgagattagtcagagagtttctttggcagacctgttaggctatcccgaagctaaatttgttaagattgaagctggtaaaaaacaggatcaagaagtggtcttggtcaaagattttcccctggtaacagaaacctccttagaagtctacgccaaagaggtaactgatttgctgatggatgttcaagatttccagcaacctattttagttctctttactgctaaagacatgcttctagcagtgtcggatttacttccagttagccacttggcccagtataaaaatggggatgttcatcaactgaagaaacgctttgaaaaaggtgaacaacaaatcctgctaggtgcagcaagtttctgggagggagttgatttttcaagtcattcttttgtgattcaaattgtaccaagacttcctttccaaaacccccaagaacccttgacgaaaaagatcaatcaggaactaattcaagaagggaaaaatgccttttatgattatcaattgccaatggccattattcgtttaaaacaggctttaggaagaagtatgagacgtgaacaccaacgttccttaactctgattttggataggagaattgtcggaaagcgatatggcaaacaaattgtgacttctctagcaaaagaagcgattgttaaaaccgtctctcaatccgaagttgatgaggctattgataaatttttaaatgaactttgataaatagtattgtatgaaagtataaggttagtatatatgaaacgttctctcgactctagagtcgattatagtttgctcctgccagtatttttcctactggttatcggcgtggtggctatttatatagctgttagtcatgattatccaaacaatattctgcccattttagggcagcaggtcgcctggatcgccttggggcttgtgattggttttgtggtcatgctctttaatactgaatttctttggaaggttacaccctttctatatattttaggcttgggacttatggttttacctatcgtcttttataatccaagcttagttgcatcaacaggtgccaaaaactgggtatcggtaaatggtgttaccttgttccagccgtcagaatttatgaagatatcctatatcctcatgttggctcgtgtgattgtccagtttaccaaaaaacataaggaatggagacgcacagttccgctggacttcttgttgattttctggatgattctctttaccattccagtcctagttcttttggcacttcaaagtgacttggggacggctttggtttttgtagccattttctcaggaatcgttttattatcgggggtttcttggaaaattattatcccagtatttgtgactgctgtaacaggaattgctggtttcttagctatttttatcagcaaggacggtcgggcttttctccatcaactgggaatgccgacctaccaaatcaaccgtattttggcttggctcaatccttttgactttgcccaaacaaccacttaccaacaggctcaaggacagattgccattggaagcggtggcttatttggacaagggtttaatgcttcgaatctgcttattccagttcgagagtcggatatgattttcacggttatcgcagaagattttggctttattggctctgtccttgttattgccctttatctcatgctgatttatcgtatgttgaagattactcttaaatcaaataatcagttctacacctatatttccacaggtttgattatgatgttactcttccatatctttgagaatatcggtgccgtgacaggtttgcttcctttgactgggattcccttgccttttatttcgcaaggaggatcggctattatcagtaatttaatcggtgttggcttgcttttatcgatgagttaccagactaatctagctgaagaaaagagcggaaaagttccattcaaacggaaaaaggttgtattaaaacaaatcaaataaggagaaaatcatggtaaaagtagcagttatgttggctcagggctttgaagaaattgaagctttgacagttgtggatgttttgcgtcgtgcaaatattacttgtgatatggttggttttgaagagcaagtgacgggttcgcatgcaatccaagtaagtgcagaccgtgtttttgatggtgatttatcagactatgacatgattgttcttcctggaggtatgcctggttctgcacatttgcgcgataatcaggccttgattcaagagttgcaaagctttgaacgagaagggaagaaactggcagccatttgtgcggcgccaattgccctcaatcaagcagggctattgaaaaacaagcagtacacttgctatgatggcgttcaagagcaaatctttgatggtcaatatgtaaaggaaacagtagtggtagatggtcatttgataaccagtcgaggcccctcaacagcccttgcctttgcctacgagttggtggagcaattaggaggagacgcagagactttacgaacaggaatgctctatctagatgtctttggtaaaaatcagtaaaacgggagtcaaactctcgttttttatgtggaaaactcagggaaatcatcgcttttttcataaaaaaatgctataatgaagggtatgaaatatcacgattatatctgggatttaggtggaactttactggataattacgaaacttcaacagctgcatttgttgaaacattggcattgtatggcatcacacaagaccatgacagtgtctatcaggctttaaaggtttctactgattttgcgattgagacattcgctcccaacttagagaattttttagaaaaatataaggaaaatgaagccagagagcttgaacatccgattttgtttgatggagtttctgatttattgaaagatatctccaatcaaggtggccgtcattttttggtttctcatcgaaatgatcaggtcttggaaattttagaaaaaacctctatagcagcttattttacagaagtggtgacttctaactcaggctttaagagaaaaccagatcctgaatccatgatttatttaagagaaaaatatcaaattagttcaggccttgtcattggtgatcgaccgattgatatcgaagccgggcaagctgcaggactagctacccacttgtttaccagtatcgtgaatttaagacaagtattagacatgtaagaaaaaggaataagatgacagaagaaatcaaaaatctgcaggcacaagattatgatgccagtcaaattcaagttttagagggcttagaggctgttcgtatgcgtccagggatgtatatcgggtcaacttcaaaagaaggtcttcaccatctagtctgggaaattgttgataactcaattgacgaggccttggcaggatttgctagccatattcaagtctttattgagccagataattcgattacagttgttgatgatggacgtggtatcccagtcgatattcaggaaaaaacaggtcgacctgccgttgagactgtctttactgttcttcacgctggaggaaagtttggcggtggcggatataaggtctcaggtggtcttcacggagtggggtcctcagttgttaacgccctttcaactcaattagatgttcatgtccacaaaaatggtaagattcattaccaagaataccgtcgtggtcatgttgtcgcagaccttgaggtggttggagatacggataaaactggaacaacagttcactttataccggatccagaaattttcactgaaacaacaacttttgattttgataaattaaataaacggattcaagagttggcctttctaaatcgtggtcttcaaatctccatcacagataagcgtgaggggctagaacaaactaagcattaccactatgaaggtgggattgctagctacgttgaatatatcaacgagaacaaggatgttatctttgatacaccaatttacacagatggtgaaatggatgatatcacggttgaagtagccatgcagtacacaacgggttaccatgaaaatgtcatgagtttcgccaataatattcatacccatgaaggtggaacgcatgaacaaggtttccgtacagccttgactcgtgttatcaacgattatgctcgtaaaaataagttattgaaagacaatgaagacaatctaacaggggaagatgttcgtgaaggattaactgcagttatctcagttaaacacccaaatccacagtttgaaggacaaaccaagaccaaactgggaaatagcgaagtggttaagattaccaatcgcctcttcagtgatgccttttctgatttcctcatggaaaatccacagattgctaaacgtattgtggaaaaaggaattttggctgctaaggctcgtgtggctgccaagcgtgcgcgtgaagtcactcgtaaaaaatctggtttggaaatttccaaccttccaggaaaactagcagactgttcttctaacaatcctgcggaaacagaactcttcatcgtcgaaggagattcagctggtggatcagcaaaatctggtcgtaaccgtgaatttcaagcaatccttccaattcgcggtaagattttgaacgttgaaaaggcaagtatggataagattctagctaacgaagaaattcgtagtcttttcacagcgatgggaacaggatttggtgcagaatttgatgtttcaaaagcccgttaccaaaaactcgttttgatgaccgatgccgatgtcgatggagcccatattcgtactcttcttttaaccttgatttatcgttatatgaaaccaattctagaagctggttatgtctatattgcccaaccaccaatctatggtgtcaaggttggaagcgagattaaagaatatatccagccaggagcggatcaagaaattaaactccaagaagccttggcccgccacagtgaaggacgtgccaaaccaaccattcagcgttataaaggtttgggtgaaatggatgatcaccagttgtgggaaacaaccatggatcccgaacatcgcttaatggcaagagtttctgtggacgatgctgcagaagcagataaaatctttgatatgttgatgggggatcgagtagagcctcgtcgtgaatttatcgaagaaaatgccgtctatagtacacttgatgtctaaaaaatcgggagaagtagttcccttggtctaaaaaatatgatataatcattacgattgtttcaagttaaaaaggagtttaatatgtctggtagtctagtagtatatcttataattgcaattgcaattatattgctgatttcatatgctatagcaatttatgtacggaaacgcaatgaaagtaaattagcaattttagaagagaaaaaagaagagctgtacaatcttccagttaatgatgaagttgaagctgtaaaaaatatgcacttgattggacaaagtcaagtgactttccgtgaatggaaccaaaaatgggttgacctatctcttaactcttttgccgatatcgaaaataatcttttcgaggcagaaggttataacaattcattccgttttttcaaggccagtcatcaaattgaccaaatagagagccaaattactttgattgaagaagatattgcggcaattcgcaatgccttggcagatttggagaaacaagaatctaaaaatagtggacgtgttcttcataccttggacttgtttgaagagttgcaacaccgagttgctgatcattctgaagaatatggccaaggtttatctgaaatcgaaaaacaattggaaaatatccaatcagagttttctcagtttgttactttgaatacttcaggtgacccagtagaagctgctgtaattttggataatgctgagaatcatatcttggctttgagtcacattgttgaccgcctgccagcgattgtaaaaacattatctaaagagctacctgatcagctggaagatttagaagatggctaccgtaagcttttagatgctaattatcatttttctgagacggatattgaatctcgcttccaattgctttatgaagctttgaagaaaaaccacgaaaatattgcacaattagagttggataatgctgagtatgaaaatactcaagttcaagaagaaatcaatgcactctatgatatctttacacgagaaattgctgctcaaaaagtagtagaaggctttgttgcaacccttcctacatatttgaaacacatgaaagatagtaatgctgttttagtggaagatattcaacgattgagtaacaattacctactatctgacacggatgttagtcatgtacacagattacaagctgagttagaatctctggaagaatctgtattggaattaacttctgaacaagaggaatattctgagccatattcattacttgaagaacgtttggaaaacttacaagcaactttgaaagaaattgaggatgaacaagttgcggttagtcaacgtcttgctcagattgaaaaagatgatatcaatgctcgccagaaggcaaatgtttatgtcaatcgtcttcataccattaagagatatatggaaaaacgcaatcttccaggtatccctcagaatttcttacagttgttctttacagcaagtaaccatacagaagagttgatggctgagctagaagaagcccaggtcaatatcgaagctgtaaaccgtatgcttgaaattacaacaaatgatatggaagcacttgaagcagaaacgtataatattgttcaatatgcaacattgacagaacaattgctacagtattcgaaccgttaccgctcatttgatgaacgaattcaggaagcctttaatgaatcattagaaatttttgaaaaagaatttgattaccatgcttcatttgataagatttcgcaagctttagaagttgcagaacctggtgtaaccaaccgttttgttacttcatatgaaaaaacacgtgagacaattcgtttctaaaaaaggctctttgtcaactgtagtgggttgaagaaaagcggctctttgtcaactgtagtgggttgaagaaaagctaagattgagaaaggacacatttcgtcctttcttttttgatattgagagcgataaaaattcgttttttgaagttttcaaagttccgaaaaccaaaggcatttcgcttgataagtttgatgagattattggtcgcttccaatttggcgttggaatagggtagttgaagggcattgacgattttctctttatccttgagaaaggttttaaagacagtctgaaaaagaggatgaacctgcttaagattgtcctcaataagtccgaagaatttgtcaggttccttgttctgaaagtgaaaaagcaagagttgatagagattgtagtggtgtttcaagtcttctgaatagctcaaaagcttgtctagaatttctttatttgttaagtgcatgcgaaaagtagggcgataaaaacgtttatcactgagtttacgactatcctgctgtatgagcttccagtagcgcttgatggctttgtattcatgggattttcgctcaaattgattcatgatttggacacgaacacgactcatagcacggcttaagtgttgtacaatgtgaaatcgatctagaacgattttagcacatggaaaaagctgtttagccaaggcataataaggactaaacatatccatcgtaatgattttcacctgacaacgaacagctcgctcgtagcgcagaaagtgatttcgtatgatagcctgtgttctgccttcaagaacagtgatgatgttgagattatcaaaatcttgtgcaatgaaactcatctttcccttggtaaaggcatactcgtcccaagacataatctctggaagacgagaaaaatcatgcttaaaacggaagtcattaagcttgcgaatgacagttgaagttgaaatagctagttgatgagcgatatcggtcatagaagttttttcaatcaatttttgcgcaattttttggttgataatacgaggaatttggtgatttttctcgacgagagaggtctgtgagaccatcattttagagcaatgatagcacttgaaacgacgctttttaaggaggattttggtaggcataccagttgtttcaaggtaaggaattttcgatggtttttggaagtcatatttcttcatttgacttccacattcaggacaagatggggcctcataatccagtttagcgatgatttccttgtgggtatctctattaacaacatccataatttggacattagggtctttgatatcgagcagttttatgataaaatgtaatggttccatatgattctttctaatgagttgtttcgtcgcttttcattatagatcttatgggactttttttctacacaaaaataggctccataatatttataggggatttacccactacaaatattatagagccatcttttttattgcttaattgtttttaaaaatgcccagttaccaattgattttgatccgtattctaagtccatatagtccagtaatacataatcatttttttcatagaaagaggcattgtttgctgtgcttgtaatgaggcccaagtacttacagccttttgatttgacatagggttcaattccttgtgtcagaaaagtactgcctattccctggcctttatttactgtattgacagctaaagccatcaaataccaatcaaactcacctgattgttctaagtgctttttggaacgttttacaaagtcaaagtatttaaaaagattacgtggtcgaatgtagcgaaaaatttttgttccgccatttcgtagataggatagtatacagaaatccttttgttgcaaaagggcaactgctagtaattctccatcttgttcagcaattaaacagtttccttttttaatatagactctagtaagcagaatttgcaatgtttctacgaaagaaggataggaatcagctttctttaaaccatcaattattatcgttaaaaaaggatagtcaagaaaggacttggctaatagttttccaattttttcgtactcctcaattcttgcctctctatatattatgtctcccatgtttgtttccttagttacctatgaaaccgtgtttgataggattgtaagataaaaaattggagatgatttaaaaagcaagtgagaacctcgttttgtgctgtaaggttcaaaaaactttttaatctctccaaaatgttatttggttggaatcgaaattccaattaatttttctgaatagagggttttgatattggcctcatcaatagaatccttatcaattttacgtttcaagaaaaactcttgaatagcttcgatttcaggttcgcgaatagcacggtgtttgtttgagatgaggatttcatagtgaagcggagcttgggtaaaaataacatcagtattccctgcagaatagacctcaacaagggttgcatctgtactttctagctggctttttacaagttgcgagtgtgagtttgtcgtattgattagcttcataacatttcctccgattttctaattctattatagcactttttaaataaagtagcttgctttatactcaatgaaaatcaaagagcaaactaggaagctagccgcaggctgtacttgagtacggcaaggcgaagctgacgtggtttgaatttgattttcgaagagtattagtcaatcttatgatgttttttccaagattggatggcccatttatggctaccacgtttgagattttcaatagcctcgtcaatagggaaccaggcaatatgattaaagtcttctagtggcttttgcacttctttgaaagaagttgcttcatagaggtaggcaggattgtagtagtaggtgtcacgatgacgagagtagaaatattcgtcagcttgtccgtaataggcaccaatttcagctgtgaagccaagctcttcaatcaattcacgttttagggcttcctgatggttctcaccagcttcaatttcgccacctggtaggaaccaagcgccattgggtgcttgaacaagaacaatttgtttttgttcagcatcaggtataactgcatatacgccatagcgtgaaacatagtctgtattcgcttttttttctccgaaagttgggtttgccattgcattttcctcattatctattatctttattattatcttaatggacaaaggcctagctgtcaagaatttatagttattttagtaaaaaggagcagaaaattttcattttctactccttttctataggatttatacttctttttcagaagtctttacttcagcttttttggcagatttgatttgaatgttacccttgctggtcatcactgccttgaggtctttttcgcttggattttcaaggtagtagtcagtgattgcgtcctcaatatagtcttgaatagtacgacgaagtgggcgtgctcccatttttggatcataaccaaggtcaaccaatttttccttgaccttgtcggttacatccaaatgaatgttgttgctagaaagacgtttgttaacatctgcaagcataagctcgacaatctgaaggaggttatctttgctgagagccttaaattcgataataccatcaaaacggttcataaactctgggctaaagaagttaccgagttcaccaagaacagagttggtacgtccttctctagcagcaccaaatccaacgctagcttctgccttacctgtacctgcatttgaagtcatgatgatgatggcgtccttgaagctaacggtacgtccttgtccatctgttaaacgaccatcgtccaagacctggaggaacatatgcatgacatctggatgggctttctctacttcatccaagagaataagagagtagggattgcggcggactttttcagttaattgcccagcctcgtcatagccgacataacctggaggggcaccgactaatttcgccacactgtgtttttccatatattcactcatatcaaagcgaatcatgctgtcagcagaaccaaagagttcgatagctaattgtttggaaagttctgtcttaccgactccagttggcccaacgaaaaggaaacttccgattgggcggttaggggtaccgagaccgacacgattacggcgaatagccttggcaatcttatcgacagcatcatcttgtccaataacatgagacttgaggtcttcggctagatggatgagttgagattgttctttctcttttaaatcaccaacaggaatattggttttctgctcgataatgtgctcaatggttttctcactaatgataggagtatcttggtctgtgacctttttcttttgcatttccttatacttggcaatctggtcacggaagtaggcggccttctcaaaatcttcttctcgtgtagcttgagatttaagattttcagcctcaatcaagcgctgatcgattactttaggatccacaaaattcaaggtcaagttcatcttagaaccagcttcatctaggaggtcaatggccttgtcaggcaagaagcgatcttggatgtagcgattggacagagttgcagctgcttcaattgcagcatcggtatactgaacgtggtggtagtcttcgtatttcttttgaatgcctttgaggatagtaattgtttcctccactgttggttcatccactttaacaggttgcatacgacgctctagggctgcatctttttcaatgatacggtattcattgagggtagtagcaccgaccaattgcagctctccacgagcaagggcgggcttgaggatatttcctgcatccatattgccatcgcccgcagaaccagcaccgacaatttcatggatttcatcgataaagaggatgatgtcctcacgtttgcgaatttcttccatgagtttttgcatgcgttcttcaaattgtccacggatacccgttccttgaactaagctaaccacatccagacggatgacttgttttccttgtagtttatggggaacatctccatcaactattttctgagctagaccttcgacaacggcagtttttccgacacctggttcaccgataagaacaggattattcttggttctgcgattgagaatttctatgacacggataatctcatcgtcgcgcccaataacggggtcaatatctccacgacgggcaatttcagttacgttgataccaaattcttccagtaggcctttttcttggcttggtggaggagtttgagcaggtccacgattttgggaaccataaccgccatttccaccgtaacctccacctgattgggttgggggagtcggaggagtattgttagaaggcctgaaattgtttaggtcattgaagaaatcaccaaagggatcaaagtcacgattgttcagatccgtaatacctttaaagaggctattgttaggatctgtcttgataatcttatagcagttttgacagaggtcaatttgtttttgctttccattgagattggtataaagatgaatcgttgagtcattgattttacagttttgacaaagcatacatctacctcatttctttatttagcctgacctgtttaatggtcaaaaatagtcaaatttctatactctcattataacaggattggggtgtaaagcaagtaaaaagattgcagctttgagaagttgttacaatgaagaactttgtggatttggactataaaaaaatcctatttgtgagacaaaaaggattttggttagacatgcagggtgtaatcccagcttgttttgtattagtaaaggagttcgtaaatctccattgcaatcaagtcaatgctgtcaaacgtataagtttcgcgagcttcgacatcacgaagggtaaagattgagccgttttcttcgtcgtggctgtatgcaacttctgcaacaacaactcyttcgcgttcaaaattacgttttaaatttccaccgtcttttgtcattgcttcaaggcggttgatgattctaaccaaatgtgattccattttgattctccttcatttcttatcgttactattttaccataaaggaggtcaacttgcctagaaaaaactaagatttctcgctaattctactagcttaaaggttttttgaataaattagacaaaagatttgaattttaattcaatacatgttataatcatacagtattctattttagaaagcagtgtgactatgaatttttcttttttacctaagtatttaccttattttaactatggggctgtcgtgacggttctcatttctatctgtgttgtcttttttgggactattttgggtgttgtcttggcttttgggcaacgttcaaagtttaaaccgcttgtttggctcgccaacttgtacgtttggattttccgcgggacaccgatgatggttcagattatgattgcctttgcccttatgcacatcaatgctccgactattcaggttggaattttgggtgttgatctttctcgtctgattccagggattttgattatctctatgaacagtggtgcctatgtttctgagactgttcgtgctgggattaatgcggttccaaaaggtcagttagaggcggcctattctttagggattcgtcctaaaaacgctatgcgctatgtgattttgccacaagcaatcaaaaatatcttaccagcattggggaacgaatttatcactattatcaaggatagttccctcttatcagctattggtgttatggagttgtggaacggggctacaacagtttctacaacaacctatctacctttaacaccacttttatttgcagccttttactacttgattatgacctctattttgacagtagccttgaaagcttttgaaaaacgtatgggacaaggagataagaaataatgacagaaaccttgataaaaattgaaaatttacataaatcatttggaaagaatgaagtattgaagggcatcaacctcgagattaaaagaggagaagttgtcgttatcatcggtccttcagggagcgggaaatctaccttgcttcgctctatgaatttgttagaagaagcgaccaaagggaaggttatctttgagggagtcgatattacggacaagaagaatgacctctttgccatgcgtgagaagatgggcatggttttccaacaatttaacctctttcctaatatgactgtgatggaaaatatcaccttgtcacctatcaagactaaaggtgaaagcaaggcagttgctgagaagagagcccaagagttgttggaaaaagttggcttaccagataaggcagatgcttacccacagagtttgtcaggtggccagcaacaacgaattgctattgcgcgtgggttggccatggaaccggatgttttgctctttgacgagccaacttcagccctggaccctgaaatggtaggtgaggtgttggctgttatgcaagacttagccaagtcaggaatgaccatggttatcgtaacacatgaaatgggatttgctcgtgaggtggcagaccgtgtcatctttatggcagatggtgtggttgttgaagatggaacacctgaacagatttttgaacaaacccaagaacaacggactaaagacttcttgagtaaggttttataagttagttttgtggagctatttgtagctaactttacatataaagtatagattaatgaaaagctcgactagagctttttcttatagtttgaaactataggatagcctaggaaagaagtgttagaggggattagcagtttttggtataatggaagatatttgaaagaaaagagaagtgatatgacacagattattgatgggaaggctctagcagctaagttacaaggacagctggctgaaaagactaaaagattaaaggaagaaacggggctagtacctggtttggtagtgattttggttggggacaaccctgccagccaagtctacgttcgtaacaaggagaggtcagcccttgcggctggattccgtagtgaagttgtgcgagttccagataccattactcaagaggaattgttagacttgattgccaaatacaatcaagattcagcttggcatgggatattggtccagttaccattaccaaaacatattgatgaagaagcagttttgttggccattgacccagaaaaggatgtggatggtttccatcccttaaacatgggacgcctctggtctggtcatccagtcatgattccttctacgcctgcaggaattatagaaatgtttcatgaatatgggattgaattagaaggtaaaaatgcggttgttatcggtcgttccaatatcgttggaaaacccatggctcagcttcttgtggccaagaatgcaacagtgaccttgactcactcacggactcataatcttgccaaggtggctgctaaagcagatattctggttgttgcaatcggtcgtgccaagtttgtaactgctaactttgtcaaaccaggtgcggttgtcattgacgttgggatgaatcgcgatgaaaatggtaagctttgtggagatgtggattatgaagcggttgccccacttgctagccatatcacgccagtccctggaggtgtcggtcctatgaccattaccatgctgatggagcaaacttatcaggcagcgattcggacattggatagaaaataagagaaaaattttctgagaaaagtgtattttctatagctatatctaaaatggcagaaatgaatattaaattttagaaataagtttataaaaggaggtatgtgcctcctttttgttgtataatggagtgaggtgattagatgattttaaaaatttataatggggaatatagtttacaatgggatggaatatactacttagcactaattgattatccaaatattcaagagtgggaattagaaaaaattgctaaatttatagcttacgaaaaacttcataaacgtcaaacaagtattgagtgtgctgattcttgtttaaaaaaagaaattttagattacatctgtcagcatccctttctgccaccatttactcctacagataaaagagtagcctcgacttatgacctacataagaggttagtgacttcagactactgtagtcatactacgactatagatgcagcgatttctatttttaaaactggtcgtcttttatctgctgtgaaagcctttgggcgagatgctgaggagttggttttggatagtcgaaatgctgcatctgatccgatagattattttgactatgtcatgttagggtggtcaaatacaagttctggttatcgattggcgatggagcgtttattaggtcgagctccttcagagaaagaattacaagacaagtttattcctggagtaagttttcattttatctatacagatttgattaaagttcctggttatatttttgatggttaccatgctgtaaaaattaaggacatgcttaatttattaagtgagttgtatatttgcattattccaactcataataagagccaatttgaaaatattattccaaccaaaatacaagatagggtgtattatcttgactatgctggagaagacttagaagagtggactaagaaagtctatcaagttgttttaaaacaatcagataaaggatagttgaggaaaaacgatgagagtgattgagcaagcattattagaaaaagtcattattgaacgttctcgtacaagtcataaaggaaattacggtcgtctgctgttgctgggtgggacctatccttatggtggtgctattatcatggctgctttggcagctgtaaaaagcggtgcaggattggtgaccgttggaacggatagggaaaatatccctgctctgcacagccatttacctgaggctatggccttttctctgcaagaccagcaattgttacaagagcaattggagaaggcagaagttgtcttgctggggcctggtttacgagatgatgtttttggagaagatttagtaaaacaggtctttgctagcttaagacagaatcagattttgattgtagatggaggtgctttgactattcttgctaggacaagtttgtcatttccgtctaaccagcttatcctaactccccaccaaaaagaatgggaaaagctgtctggtattgctattgaaaatcaaagcgaagctgcaacggctagtgccctgacttccttccctcaaggaacgattttagttgaaaaaagttcagctactcgtatttggcaagttggccaatctgattattaccagttacaggttggtggtccctatcaggcgactgggggaatgggagatactctggctgggatgattgcaggatttgtaggccaatttcgacaggccagtctctacgaacgtgtggcagtagcaacccatcttcattcagccatagcccaagaactatctcaagaacattatgtggtcttgccgacggaaatcagtagtcatcttctcaaaataatgaaaaaaatatctcaaaaaggcacctgatcgtttcaggcgcctttatatttttagaaaaatcctttaatctttccaacgaggccatctagaccttcagaaccagaaattaactgctgagcttgggagaagtattctccaagctgttcttgattttctgcaacaaatgtttttgccgcttcgaaatcttttgtttcgattaattcttttacttggttaaacaaatctaatgggttcatcttatttctccttttctttacttaactatttaatcatctttatgataaaaaatcaactgttgctacttttggctaatattctaactaccaaaacaaggtggacataaaaataaaaatgttcggtttttttcagtgtatccatgaaataaaaagtgatacatgttataataaagttagctctttaatggaggtgtttgagtggaaaatctgaaaaaaatggcaggtatcaaggctgctgagtttgtcaaggatggaatggtagtcggactaggaacggggtctactgcctattattttgtagaagaaattggtcgtcggattaaggaagaagggttacagattacagctgtaacgacttctagtgtgactagtaaacaggctgaagggcttaatatcccgctcaagtctattgaccaagtagatgttgtcgatgtgacggttgatggagcggatgaagtggatagccggtttaacggaatcaaaggcggtggtggtgcccttctgatggagaaggttgtagcaacgccctcaaaagaatatatttgggtagtggatgaaagcaagctagtcgagaaactgggtgcttttaaattgccagtagaagtggttcagtatggcgcagaacaggtctttcgtcgttttgaacgagctggctacaaaccaagtttccgtgaaaaagatggccaacgttttgtgaccgatatgcagaactttatcattgaccttgccttggatgtcattgaagatccaattgccttcgggcaagaattggaccatatcgttggtgttgtagagcacggcttattcaaccaaatggtggataaggtcatcgttgctggacgagatggggttcagattttaacttcaacaaaagcaaactaatcaacataataaggagacacattatgtcaaaatttaatcgtattcacttggtggtactagattctgtaggaatcggtgctgcaccagatgccaataactttgtcaatgcaggggttccagatggagcttctgacacattaggacacatttcaaaagcagttggtttgaatgtcccaaacatggctaaaattggtcttggaaatattcctcgagaaactcctcttaagactgttccagctgaaagcaatccaacaggatatgcaacaaaattggaagaagtatctcttggtaaggataccatgactggacactgggaaatcatgggccttaacattacagaacctttcgatactttctggaatggattcccagaagaaatcttgacaaaaattgaagaattctcaggacgcaaggtcattcgtgaagctaacaaaccttactcaggtacagccgttatcgatgactttggaccacgccagatggaaactggggagttgattatctatacttcagctgaccctgttttgcaaattgctgcccacgaagacatcattcctctggatgaattgtatcgtatctgtgaatacgctcgttcgattacccttgagcgcccagcccttctaggtcgcatcattgcccgtccttatgtaggtgaaccaggtaacttcactcgtacagcaaatcgtcgtgacttggccgtatctccatttgcaccaactgttttggataaactcaatgaagctggtatcgatacttatgctgttggtaaaatcaatgatatctttaacggtgcgggtatcaaccatgatatgggacacaataagtcaaatagccacggaattgatacactcttgaagaccatgggccttgctgagtttgaaaaaggattctccttcacaaacttggtggactttgatgccctttacggccaccgtcgtaatgctcacggctaccgtgattgcttgcatgagtttgatgaacgcttacctgaaattatcgcagccatgagagagaacgaccttctcttgattactgcggaccatggaaatgacccaacgtatgcaggaacagaccacactcgtgaatatattccattgttggcctacagccctgcctttaaagggaacggtttgctaccagtcggacattttgcagatatctcagcgacagttgcggataactttggtgttgaaactgccatgattggggaaagtttcttaggtaaattggtataagatgacgcgatatgctttacttgttcggggcattaatgtcggtgggaagaataaggttgtcatggcgcaacttcgtcaagaattgacagagttgggactgggaaaggttgaaacctacatcaacagtggcaatattttctttacttcgacagatcccaaagcccaattggttgaaaagttagagtctttctttgaaatccattatccatttattcagagcttttctttgctgagtcaggaagattatgaagaagagctgaataatctgccagattggtggatcaaagatttggcacgaaaggatttcctcttttacactgagggattggatgttgttcaagtcattgagacagttgaaagtttggaattgaaagatgaaatcgttcattttggaagacttgggattttctgggggaaattctctgaggaatcctactatgcaactgcctatcacaaatacttactcaagatgcctttttatcgcaacatcaccattcgtaatgctaaaactttcgacaaaatcggtcaaatgctaaaaaataataaaggagacatacaatgacatttttagataaaatcaatgaaactgctgccttcctgaaagaaaagggtatcctagcgcctgagttcggtctaatccttggatcaggacttggagaattggcagaagaaatcgaaaatccagttgtagtagattatgcagatatcccaaactggggccgttctacagtagtcggacacgctgggaaattggtatatggagaacttgcaggtcgtaaggtcttggctcttcaaggtcgtttccatttctacgaaggcaatcctcttgaggtcgtgactttcccagttcgtgtgatgaaagtactcggatgtgaaggtgtcattgtaaccaatgcagctggcggtattggatatgggcctggtactttgatggctatctcagaccatatcaacatgacaggtcaaaacccattgatgggtgaaaacttggatgaatttggtcctcgtttcccagatatgtctaaagcctacacaccagaatatcgtgctactgcccatgaagtggctaaaaaacttggtatcaagcttgacgaaggtgtctatattggtgttactggtccaacttatgaaacaccagcagaaatccgtgcttataagacactgggagcagatgcggttggtatgtctactgttcctgaagttattgtggcagcccactcaggcttgaaagttctaggaatttcatgtattactaactttgcagctggattccaagaagaactcaaccacgaagaagttgtagaagtgactgaacgtgttaaaggcgacttcaaaggtttgcttaaagcgattcttgcagaattgtaatcatgttaatagaattgaggagtatttttcgaaaaatcccttataattttagatttttcctagcagtaattctgcaaggaatagtttcgggtttatctggtatttttctccattatctattagagatggtggaggagctagcttttggtcagtcagagcatcatagtggatttttgacagatggagtttcctcttcacggataggactaagtttaatgatggtgggtcttggctcatccttggtctggtatttcttgcaaaaagggtcgaagatttattccatcaaagctcagatgaaggatgagacttcacaatacaagcttcattttctaaaacagctatttcattcaatttggcagatcattgcagttggagggggagcgcctattggcaaagaagctgcgccacgagagattggaactctatttgcaggaccaattggaaaaatatgttctctctctaagaaggatcgcatctttctccttgcttgtggtgctggtgctggtttagcggctgtttatcaggttccattaacaagtgtcttctttgtttttgaaaccttaggaattgatctatctattaaacgatttgtcttagtcggtttgactacctatgtctcaacctatatagcaggctgggttatttcagatcaggctctctaccagattccagccatcacatggtcattaaagcaaatatggattattcccttattacttcttttcttaaccccactagcttggctttttggtcgcttaagtaaggcagcgtcttcaaaaaggataaaagataaacgaatacttctaacattgtcctcagcttttctttttcttattggattagcaagttattttccacatctacttggaaatggacgtatgatgtctcaggaagtattgaattgtagcaatggcaaaacagtattcctcttatttatcctaaaagcactggtcgttcttattactctgtgggcaggggcctatggtggtacacttacgccatcttttgccttggggatggctggagctgctctctttggaatgattctaggtggagatagccagccaagcattttacttttgggatcggtttgctttttgtctgtgaccttgagggcgcccatttctgcaaccggattagttataggtttcactgggctaggtatagattctcttccgtatctcttagtaacagctgttttagcctatgaacttgcaaaaatgctagaccgctttccttggactagcatactgtgtcagaagtcaaagagtaaagtaattaggtaggaaatgcccatttcttctagtcaatgatttgatttaaaagattaaaaaaactctcaatttatttataactgttttaaataaaaatgtagtaggcctattggaatcttgattgaatccgatttttcctagctatgaaatataaaaataaaaaaagaaaggtagagcgcgtgttctaatttgaacacgaacggaaaacttttctaaaaattcagaagagaaggggagttctgctttgaattgaagccggtctaatcttctcaatatcatcaaaattaagaaagaaaggaattgaacccaccctaaaagcagtgggaaaaagatagttggtctagcgagcatcgctcactgcacccaactcctattttccctttgttttttgacgggtttggtatcttatattatgtctatccatattgctgctcagcagggtgaaattgctgataaaattcttcttcctggggatcctcttcgtgctaagtttattgcggagaatttccttgaagatgctatttgttttaacgaagtgcgtaacatgtttggttatactggtacttacaagggccaccgtgtctctgtcatgggaactgggatgggaatgccatcgatttcgatttatgcgcgtgagttgattgttgactacggtgtgaaaaaattgatccgtgtgggaacagcaggttcattgaatgaagatgttcacgtccgtgaattggttttggcgcaagcagctgcaaccaactctaacatcatccgcaatgactggccacagtacgatttcccgcaaatcgctagctttgatttgctggacaaggcctaccatatcgccaaagaacttggtatgaccacccacgttgggaacgttttgtcttctgatgtcttttactcaaactactttgaaaagaatatcgagcttggtaaatggggagtcaaggctgtggaaatggaagcagcagctctctactatttggctgcccaacatcacgttgatgcccttgctatcatgactatctctgatagtttggtcaatccagatgaagacacgactgcagaagaacgccaaaataccttcacagatatgatgaaggttggattagaaaccttgattgcagagtaattatatctaaaaaaggaagcccttctttatgaattggaggacttccttttcttatctagaaattgatctagctctctttgatttcgaagaatagtgactttatgtgagtattcttggcaaagtttttggtaattttttctttgagctttagttcgtccatcccagagaatccatcgaataaactcccaattaaattgttctcgacaaccttctgccatactttctctgaccttgccccgatatgtaatgtaacgcttaaatgctcgaaagagacaggtcaatggagaaaaattaagaaagatgatttggtcagcttcctgcattctttcttcgtaatagcaccaagaataattaccatcgataacccaagattcattctttgtgagaaagtttttcatctcggtcaacatccatccgcggtcactgtcttgccaaccaggttgaaattggagtgtgtccatgtgaagttttgggatggagtagtagtgagacaacttttctgctagagttgacttaccagcaccagaatatccgataattgcaattttcattttctaccttttcctatttgaggacaaaaaaacagcctctatggactgtttcttatttagcaagtttagctgaaagacgagctttgtcgcggcttgctttgtttttgtgaatcaaacctttagtttctgctttatcgatagctgagctagcagcacggaaaagttcttcagatgggtttgcttcgaaagctttgatagcagtacgcatagctgatttttgagctgagttcttttcgttttgtttaacgttcaattcagcgcgtttgatagctgatttaatgtttgccaatgttcttacctccatatttactaactataccattatatctgaaaacttacgttttgacaagggaaaattacttttttaagtaaatttcatcgatttcatggttctttgttttatgcagaatcacttccgcacggtttctggttggttcaatataattttgtagatttgtgagattgatactggtccagacctgatgggcaaaggattccacttccccaatcggcatttgtgtaaaacgataatagtagctatcaggatcgttttgggctaggctcagcattttcaagaaacggtccagataccaactctcgatgtcatcgactgcagcatcgacatagatggaaaagtcaaagaagtcagtaatgtagagacgctcgttttgtggattttgaaagacatttattccttcaacaatgacaaaatcagcagctttgacgctttgcttttcctcgggtacgatgtcgtagacttcatgagaatagacaggaatatctacatcttgtccatttttgatgtgatccaggaagttgagaagagcttccatatcatagctttcaggaaatcccttgcgatttaaaatcccttgttcaatcaagatctggttgggatagagaaagccgtcagttgttaccaactcaaccctagcatctgtaagggtacgggacagtaggatttgaagtaggcgactggttgtggattttccaacggcaacactcccagaaaccccaatgataaaaggctgggatttactttcacgttgaaggaaaatcccttttgaaaaggccaaatcatccttggtacgcttgtaaatctggatgagatgggctagggggagatagacatcggtaacatcctgcaagctaatctggtcattaaaactcttgatggattctaattcctcttctgtcaaaggaggtgtggtttttctatgtaacgattgccaagtctggcggctgattttttcaaaatgtaaaaattcgttggtcatttgttttcccctagatattttgtttatcataccataaaaagctaaaaaaataaagcggtttcttgatgatagtaaaccaatatcgtataatagaagtagatagggttgaccaatttattgatgaggtaggagctactttctcctgacttataagccaataaagggggctttgggattcacaatttataggaggtgtactatgaaaatcttaaaaagttatatactggaactctgttttattttaagttttgcactaccttttataaaaggggcgaatgcggataatggtagacgctttgtggaaatctattacggttttacttttttgatggaacatgctattgtaacagctatctttatctgttcgctcttgattgcttgcctactaaaaaaacggtggacgaaatggcttgctgctggtagttatttctttttagttctatggattgctacagagggttatttcttccgcatgtcgctagaagatttggtacgactttggacaagttgggaaatcctgacaaaaacgtatcagttgggcttttatctaaacatcctgttgggaattttgttgataattaagtatctgaaggttaagcaatagtaataagaatgcgcctaattatagatgataaacattttgttatatcctaattatgatatttctagttctaaatggcttattatttataagtgtttaaagagattgaagaaaatgttttacttactagctttcttcagtctttttcgttttattatcaatttgtaaacgatttacaatttaagtcaaattatggtaaaatagtttcatgagtaaaatgtattatgcagaaaatcctgacgctgctcacgacattcatgagttgagagtggacttattgggagaaaaaatgacctttttgacggatgcgggtgtttttagcaagaaaatggttgactttgggcagtcaactcttgctcaagtgtctagaggtcaaccaaggagagactgtccttgatgtagggtgtggttatgggcctttgggcttatccttggctaaggcttatggggttcaggcgaccatggttgatatcaataatcgtgccttggatttggcgcgacaaaatgctgaacgaaataaagtagaagcgacgattttccagtccaacatctatgaacaagttgaaggcacatttgaccatgtcatttcaaatcctcctatccgtgcgggcaagcaagtggttcatgaaatcattgagaaaagtaaagatttcttggaaactggtggagatttaacaatcgttatccagaaaaaacaaggggctccaagcgccaagtcaaagatggaggaagtgtttggcaattgtgaaatcgtcaaaaaagataagggatattatatccttagaagtgtgaaagaatgagagcagttgatttaatccaaaaaaaacgagatggtcaagaactgacttcgagtgaaattgaatggctagttgaaggctatgtgtcaggaactgtccctgattatcagatgtctgcctttgctatggctgtttatttcaaaggaatgacgactcgagaaatatctgatttgaccatgaaaatggttcagacagggcaagagtttgatttatcagctattgatggggttaaggttgacaagcattctacgggtggtgttggtgacaaggtgaccttgattttagctcctttagtagcgagttttggagttccagtcgcgaaaatgagtggtcgtggtctcggccatacgggtggaacgattgataaattagaatcaatcaagggctatcaagtagaacgtagtcaagaggatttcattcatcaagttcaggatattggtgtatctgtcattgggcaatcagaccagcttgtcaaagcagataagcttctctatgcccttcgtgatgtgaccgcaactgttgacacgattcctttgattgccagttctgtcatgagcaagaaaattgcagcaggggcggatgctattttgctagacgtgactgtcggtgagggggccttcatgaagacggttgatgaggcgcgtgaattggctcaaaccatggtggaacttggtaaggcagttggtagaaaaacggtagcagtcattacggatatgagccagcccttgggacgagcgattggaaatcgcctcgaaattcttgaagcactggagattttacaaggtcaaggccgtcaggatattacccattttatatgcgaattggctcaaattatgcttggcctggcaaatgttaacaagacagttgaagaagttcgccaacatcttgagaatggtaaggcactggctaagtttgaggagatggtccaagcccaaggtggagacttggaagacctctatcgtcctgtaaatgttgcccatgtggtggaaatccctgctcaggaaacgggtgtcatttcagctcttccagctatggaatttgggctttatgctatgagactgggggcaggccgtgcagttaagtctgatgccttggactatgaaacaggaattgtttttgaaaagaaagttggagattccgttcaaaagggagaaattgttgcaaaagtatatacaaatggaaaaatttcttctcagctagttacagattttcaaaaatatgttaaaataaatgatagtgtgcaaagtttacgagaaattatagaaatcatctcataaactgcaggagaatccgaatatgaaattaaataaatatatcgatcatacacttttgaaacaagatgcgacagtaaatcaaattgattgtttgttgtctgaagctagagagtatgattttgccagtgtttgcgttaatccgacctgggttgaacatgctaaaaaagggcttgaaggcacagatgtcaaggtctgcacagtagttggtttccccttgggagcaacaacttcagccgtgaaatcatttgaaaccaaggaagctatccaaaatggtgcagatgagattgatatggtgattaatgttggagctctcaaaacaggtaatcttgatttggttgagtcggatattcgcgcagtagtagaagcaagtggtgacaagttagtgaaagtcattattgaagcttgccttctgacagaccaagaaaaagttgtggcttgccaattagcccaaaaagcaggagctgattttgttaaaacatctactggcttttcaactggtggtgcgacagtagcagatgttagattaatgcgtgaaacagttggacctgatatgggagtcaaggctgcaggtggagctcgttcttatgcagatgctcttgcctttgtggaagcaggggcgacccgtatcggaacgtcagctggggtagccattttaaaaggagaattggctgatggcgactactgagttgattgaactagcaattgaaaccagcaagaaagcctatgtgccctattctcactttcctatcggagcagttttagtggcgaaagatggtagctcttatacaggtgtcaatattgagaatgctagttattctttgactaactgtggagaacgtacagcgatttttaaagcagtttctgaaggccaaagagaattttcagaattgattgtctatggtcagactgaaaaaccaatttcgccatgtggtgcttgtcgccaagtgatggctgaattttttgaacaagatctaaaagtgaccttagtcgcaaaagataaatcgacggtcgagatgacggtcggggagttacttccatactcttttacagacttaaactagtctgagtcgctctctgagtggcacggtccttgtggccaaccaatccatacttgcaacatcgttgcacatcttatttaggaggttcagtaatgaacaagaaacaatggctaggccttggtctagttgcagtggcagcagttggacttgctgcatgtggtaaccgctcttctcgtaacgcagcttcatcttctgacgtgaagacaaaagcagcaatcgtcactgatactggtggtgttgatgacaaatcattcaaccaatcagcttgggaaggtttgcaagactggggtaaagaacataatctttcaaaagataaaggtttcacttacttccaatcaacaagtgaagctgactatgctaacaacttgcaacaagcggctggaagttacaacctaatcttcggtgttggttttgcccttcacaatgcggttgaagaagcagcaaaagaccactctgatttgaactatgtcttgattgatgatgtgattaaagatcaaaagaatgttgctagcgtaacgtttgctgataacgaagctgcttaccttgcaggtgttgcagcagccaaaacaacaaaaacaaaacaagttggttttgtaggtggtattgagtctgaagttatctcacgttttgcagctggatttaaagctggtgttgagtcagtagatccatctatcaaagtacaagttgactatgctggttcatttggtgatgctgctaaaggtaaaacaattgcagcagcacaatacgcagctggtgcagacgttgtttatcaagcagcaggtggaacaggtgctggtgtctttgcagaagcaaaatcactcaatgaaagccgttctgaaagtgaaaaagtttgggttatcggtgttgatcgtgaccaagtagcagaaggtaagtacacttctaaagatggcaaagaatcaaacttcgttcttgtatctactttgaaacaagttggtacaactgtaaaagatattgctaacaaagcagaaaaaggtgaattccctggcggtcaagtgatcgtttactcattgaaagataaaggggttgacttggcagtaacaaacctttcagaagaaggtaaaaaagctgtcgaagatgctaaagctaaaatccttgatggaagcgtaaaagttcctgaaaaataatggatggaagtcatttcttaggaagcggccctcggccgcttttttaagagttgagacaaagtcattttgtctcagtaaagcttgctactagataaactagcaagttttattgaaataaaataagactctgaaaggaagagcacatggcacaagaaaatgtcattgagatgcgtgatattaccaaggtgtttggtgaatttgttgccaacgacaaaatcaacctgcacctacgaaaaggtgaaattcatgcacttttaggagaaaatggggctggaaagtccacgctaatgaacatgttagcagggcttcttgaaccaaccagtggtgaaattgtggtcaacggtcaagttgtcaacctcgactcaccatctaaagcagctagcttgggaatcggaatggttcaccagcactttatgttggtagaagccttcacagtggctgaaaacatcattttaggtagtgaattgactaaaaatggtgtgctagatatcactggagctagcaaagaaatcaaggctctttctgaacgttacggcttagctgttgatccttctgctaaggtggctgatatctcagttggagcccaacaacgtgtagaaattttaaaaaccctttatcggggagctgatatccttatctttgacgaaccaacggctgtcttgactccatcagaaattgatgagttaatggctattatgaaaaatcttgtcaaagaagggaaatcaattatcttgattacccacaagttggatgagattcgtgcagtttctgaccgcgttacagttattcgtcgtgggaaatcaattgaaaccgtcgaaattgcaggagctaccaatgctgatttggcagaaatgatggtaggtcgttctgtttcctttaaaacagagaagcaagcttctcaaccaaaagaagtggtcttgtcaatcaaagatttggtggtcaatgaaaaccgcggtgttccagctgttaaaaatctgtccttagatgttcgtgctggagagattgttgggattgcggggattgatggaaatggtcagtctgaactcattcaagccattacaggtcttcgcaaggttgaatctggtagcattgagctaaaaggagattcaattgtaggcttgcacccacgacaaattacagagttgagtgttgggcacgttccagaagaccgtcaccgtgatggcttgattttggaaatgatgatttctgaaaatattgcccttcaaacctactacaaagaaccacatagtaaaaatggaattttgaactattcaaatattacttcttatgctaaaaagttaatggaagagtttgatgttcgcgctgccagtgaatttgttcctgcagctgcactctcaggaggaaatcaacaaaaagcaattattgctcgtgaaattgatcgagatcctgatctccttatcgtcagccaaccaactcgtggtttggatgtcggtgccattgaatatatccacaaacgcttgattgaagagcgtgataacgggaaggctgtccttgttgtcagctttgaattggatgagattttaaacgtttcagaccgtattgccgttatccacgatggtaagattcaaggtattgtatcaccagaaacaaccaataaacaagaacttggtgtcttgatggctggtggaaacttgggaaaggagaagagtgatgtctaaaaaattacaacaaatttcggttcccttgatttctgtattcctaggaattttactcggagccattgtcatgtggatctttggttatgatgctatttggggctatgaagaattgttctatacagcctttggtagcctgcgtggaattggagaaatcttccgtgctatggggccattggtcttgattggtcttggttttgccgttgccagtcgagcaggtttctttaacgtcgggcttcctggtcaggctttggcgggttggattctcagtggttggtttgccctgtcgcatccagatatgccgcgtcccttgatgattctagcaaccatcgcgattgccttgattgctggtggaattgtcggcgcgattccgggtattctgagagcctatctagggacgtcagaggtcattgtgaccatcatgatgaactacattgtattgtatgtaggaaatgcctttatccatgccttccctaaagactttatgcaaagtacagattcgaccattcgtgttggggctaatgcaacctatcagacaccttggttgtctgagttgactggtaattcgcggatgaatattggtattttctttgccatcattgccgttgcagttatttggttcatgctcaagaaaacaactcttggttttgaaatccgtgcggttggtctgaatccacatgcttcagaatatgctggtatttctgcaaaaagaacgattatcctctcaatgattatctcaggtgccttggcaggtcttggtggagctgttgaaggtctgggaaccttccagaacgtttatgttcagggggcgtcattagctgtcggatttaacggaatggcggttagtctgcttgcggccaactcaccaattggtattctatttgcagccttcttatttggtgttctccaagttggagcccctggtatgaatgcggcgcaggtaccgtctgagcttgtcagcattgtaacagcgtctattatcttctttgtcagtgttcattaccttatcgaacgctttgtcaaaccgaaaaaacaagttaaaggaggtaagtaaagatgtctattacaacattgctcaccctcttggtatcttctatgctgatttactcagcacccctcatctttacaagtataggtggtgttttctctgaacgtggtggtgtggtaaacgtcggtcttgaaggaattatggttatgggtgccttttctggagttgtctttaaccttgaatttgcagaacaatttggagcagcaactccttggttatccttgctagttgcaggattggttggtggtgtcttctctatcatacacgcagcagcgacggttcatttccgtgcagaccatgttgtcagcggtacggtattgaacttgatggccccagccttggctgttttcttggtgaaagtactttataacaaaggacaaaccgacaacctaagtcagacttttggacgctttgatttcccattcttggcaaatatcccagtgattggtgatatcttcttcaagtcaactagtctacttggttatctggccattgccttctctttccttgcttggtttatcctcttcaagactcgatttggtcttcgtctccgctctgtcggtgaacatcctcaagcagcagatactttgggaatcaatgtctacaaaatgagatatttaggggttattatttcaggtttcctaggtggaattggcggagcgatttatgctcaatccatctcagttaacttctcagtgacaactattgttggacctggatttatcgctcttgctgcgatgattttcggaaaatggaatccaatcggagccatgctttctagtttattctttgggctttcacaaagtttggctgttatcggttctcaattgccgttcctacaaggagtgcctgcggtttatcttcaaatcgcaccttatgttttgacaattcttgtcttggcagccttctttggaaaagcagtcgcaccaaaagcagatggtatcaactatatcaaatcaaaataagcatacaaaaaacgtcagttcagaatgaactggcgttttattttttaggatgttgattggttaggttcaatccccaagggactaaattttcagtcttgtttttgatacgagcgacattatccttatgacgaatgataatcaaactagcaagtgctaggataatagcaatgaagagagggtcatagtgactcaagataaaaccaaaaagtggaaagagtaaaactccaatgacagccgcgatagatgctgtgacactagatagtgaaatcatactaccaagatagagggttccaaagaaaacaactgcaaggtagagacagaagacaggtgcaaatccgaaaaccactccagcactggttgcgacagccttgcctcccttaaatcctgcaaagatagggaaggtatgtccaatgacagccaaaagtccaaagatgagaggcgaaactccttgaagatgaaacataatcggaagcagtgttgctagggttcctttgaaaaagtcaatcacaaaggttgccataccagctttcttgcctaaaatgcggaaggtattggtcgttccagtgttaccagaaccatgctcgcgcagattgatttgaaagaatacttgtccaatccagagaccagacggaatcgaacccagcagataagctaggattaataaaactattgtaatcatactcctattatatcatgaaatggagaagaaaggcagagaatctcttctgaaattgtcacaccggagaaagaaaaattttgcaaaatccttggaaaacctgtagaatagtaaagatgaacgaataggaggttccttgtgtcaaaaaaggaaatcaatattaacaattataatgatgatgccattcaggtgctagaagggttggatgcggtccgaaaacgtccagggatgtatatcggatcgaccgatggcgctgggctccaccacctagtctgggaaatcgtcgataatgctgtcgatgaagccttgtctggatttggtgaccgtattgatgtgaccattaataaagacggcagtttaacggttcaagaccacggacgtgggatgccgactggaatgcacgctatgggaatcccaacagttgaggttatctttaccattcttcacgccggagggaaattcggtcagggtggctacaagacatctggtggtctccacggggtgggttcttccgttgttaacgctctttcaagttggctagaagttgaaatcactcgcgatggtgcaatctacaagcaacgttttgaaaatggtggaaaacctgtcacgactctgaagaaaatcggtacagcacccaagtctaaaacaggtaccaaggttacttttatgcctgatgcgacgatcttctctacgacagatttcaagtacaataccatctcagagcgtcttaatgaatcagcctttctcttgaaaaatgtgaccttgtccttgacggacgagcgaacagatgaagcgatcgagtttcactatgaaaatggggtgcaggactttgtttcttatcttaacgaagacaaggagaccttaacgccagttctttactttgaaggagaagataatggtttccaagtggaagtggctctccagtacaatgatggattttcagataacattctatcctttgttaataacgttcgtactaaagacggtggaacgcatgagacaggactcaagtctgctatcactaaggtcatgaatgactatgcgcgtaagacaggtcttctcaaggaaaaagataaaaaccttgaagggtcagactatcgtgagggactagcggccgttctttctatcttggttccagaagaacacctccagtttgaaggccagaccaaggacaaactaggaagtccacttgctcgtccggttgtggatggcattgtggcggataagttgaccttcttccttatggaaaatggggaattggcttctaatctcattcgcaaggctatcaaggcccgtgacgctcgtgaagcggcacgtaaggcgcgtgatgagagccgaaatggtaagaaaaataaaaaagacaagggcctgttgtcagggaaattaacacctgcccagtccaagaatccagctaagaatgaactctatctagtcgagggggattctgccggtggttctgccaagcaaggtcgtgaccgcaagttccaagctatcttgcctcttcgtggtaaggttatcaacacagccaaggccaagatggcggatatccttaaaaatgaggaaatcaacaccatgatttataccattggtgcgggtgtcggagcagacttctcccttgaagatgccaactatgacaagatcattatcatgaccgatgcggatacagacggtgcccacattcagactttactcttgacatttttctaccgctacatgcgtccgctagttgaggcgggacatgtctatattgcccttccgcctctttacaagatgtccaaaggaaaaggcaagaaagaagaagtggcctacgcttggacagacggagaacttgaagaactccgcaagcagctcggtaaaggcgctaccctccaacgctataaagggcttggtgagatgaatgcggaccagctctgggaaacaaccatgaatccagaaacccgtacccttatccgtgtcaccattgaagatctggctcgcgccgaacgtcgcgtcaatgtccttatgggagacaaggtcgaaccacgacgtaagtggattgaagataatgtcaagtttacgctggaagaagcgacagtattttaagttagtttttaatgaatgggtataaacatgagaactgaaacagaaatgctcgatgtagttttaaagactgctgaaaccttacaagtcacggctgtcgccatgtctggttcacggactgatacaaaagcctcaaaagatgaatttcaagactatgacgtagtctatgttgtagagaatctggacgagctgattacagatttatcttggttggaccagtttggcaaacgcattatcgagcaagaagttggtcttggtcaacgtcgtctatacctcatgctctttgaagatggaaatcgaattgatctaaccctctgtccaaaacaacaaattcaagagtgggtggatagtgaggccggatttactgttttagaagatccagagcatttatttgaaccctattcaccaaatatagagcgttactggacgaatccagctagtcagacagattttgaaaaagcctgcaatgagttctggtgggtgtcggcctacgttgtcaaagggatttgtcggaatcagctcatctacgcgaccgatcatctctatggcatttgtcaacaagaactcctgaaaatcttggcttggcaggtagcaagtgctaggggaagagtcgaaatcggcaagaactgcaagtatctctttaaccatttgccagttgaaaaagagaaggagctatctaatcttcttgatttttccagtttagacaaaatcactcagtctctatttgatacgatgcaacttttccaccaagaggctcagtcccttgctcaaaagatgggttttgactacgataaagaagtagctgaggagatgattcaatacgctgaggagagacttcttaattgctgactaatttaaaagattaaactacagaaaggattgtttggttccttaaggtaactgaacatgggactaattcccgtaaaatatcttttactgcataaaaacctactctacattctttgaaaggagttgaacacgccctaaatgctgggtgaaaaagataaattctcttgtgagcttgcttacttcaataattttctattttcacttggtattttacgggctctgtatcctatatgagtaacattcaaaacatgtcccttgaggacatcatgggagagcgctttggtcgctactccaagtacattattcaagaccgggctttgccagatattcgtgatggcttgaagccggttcagcgtcgcattctttattctatgaataaggatggcaatacctttgataagagttaccgcaagtcggccaagtctgtcggtaacatcatggggaatttccacccacacggtgacagttctatctatgatgccatggttcgtatgtcacaggactggaaaaatcgtgagattttggttgaaatgcacggtaataacggttctatggacggagatccacctgcggctatgcgttataccgaggctcgcttgtctgaaattgctggttatcttcttcaggatatcgataaaaagaccgttcctttttcttggaactttgacgataccgagaaagaacctactgtcttgccagcagcctttccaaacctcttggtcaatggttcgactgggatttcggccggttatgccacagacattcctccccataatttggctgaggtcattgatgctgcagtttacatgattgaccacccaacagccaaggtggataaactcatggaattcttgcctggaccagacttcccgactggagggattatccagggtcgtgatgaaatcaagaaggcctatgaaactgggaaagggcgcgttgttgttcgttccaagactgagattgaaaagctaaaaggtggtaaggaacaaattgttattactgagattccttatgaaatcaacaaggccaatctagtcaagaagattgatgatgttcgtgtcaatagtaaggtggcaggtattgctgaggttcgcgatgagtctgaccgtgacggtcttcgtatcgctattgaacttaagaaagacgctaatacagagctcgttctcaactatctatttaaatatactgacctgcaaatcaactacaactttaacatggtggcgattgacaatttcacacctcgtcaggtcggtattgtcccaatcttgtctagctatattgcccaccgtcgtgaagtgattttggcgcgttcacgctttgataaggaaaaggctgaaaaacgtctccatatcgtcgaaggtttgattcgtgtgatttcaatcttggacgaagtcattgcgcttatccgtgcttctgagaataaggcggatgccaaggaaaatctcaaagttagctatgattttacagaggagcaggctgaggccatcgttaccttgcaattgtatcgtttgaccaataccgatgtggttgtcttacaggaagaagaagcagaacttcgtgaaaagattgccatgctggcggctattatcggggatgagcggactatgtacaatctcatgaagaaagaacttcgtgaggttaagaagaagtttgcgactccgcgtttgagttctctagaagacactgcgaaagcaattgagattgatacagccagtcttatcgccgaggaagatacctacgtcagcgtgaccaaggcaggttatatcaagcgtaccagcccacgttcctttgcggcttcaacgctggaagaaattggcaaacgtgatgacgaccgtttgatttttgttcaatctgccaagacaacccagcatctcttgatgttcacgacgcttggaaatgtcatttatcgaccaatccatgaattggcagacattcgttggaaggatatcggtgagcatctgagccaaaccattacaaactttgaaactaacgaagaaatcctttatgtggaagtagtggatcagtttgatgatgcgacaacctactttgctgcgactcgtctcggtcaaatcaagcgtgtagagcgaaaagaattcaccccatggcggacctacaagtctaagtctgtcaagtatgctaagctcaaagatgatacagaccagattgtagcagtagctccaatcaaactagatgatgttctcttgatcagccaaaatggttatgcccttcgtttcaatatcgaagaggtaccagttgtcggtgctaaggctgcaggtgtcaaggctatgaacctgaaagaagatgataccctccaatcggcctttatctgtaacacttcatccttctacctcttgactcagcgtggaagtttgaaacgtgtttctattgacgaaattccagcaactagccgtgccaaacgaggactacaagtcttgcgtgagttgaaaaacaaaccgcatcgtgtcttcttagcaggatcagttgcagagcaaggatttgttggtgatctcttcagtacagaagtggaagagaacgaccaaacgctgcttgtccaatcgaacaaaggaacaatctatgaaagtcgactacaagacttgaatctgtcagaacgcacaagtaatggtagcttcatctctgacacgatttcggatgaagaagtttttgacgcttatcttaaagaagtatttactgaagctaaataagtgaaatgaagaatcagttctaagagctggttctttttattgaagaaattttctgaaaattacaaaatatacttgctattttagaaaaatagtgtagaataaaagaaataggtttttagaataaggagtggaatatgacagtaacgattgattgggaaaatctcggtttttcctatatgaaattaccttatcgctatattgctcattttaaaaatggacaatgggatcaaggagagcttacagaggatgcaaacttgcatatttcagagtcttctccaagtcttcactatggtcaacaagcatttgaaggtttgaaagcttatcgtactaaggatggtagtgttcaactgttccgtcctgatgaaaatgctaaacgcctgcaacggacatgtgaccgtctcttgatgccacaagttccaacagaaatgtttgtagacgcttgtaaggcagttgttcgtgcgaatgaagaatatgtacctccatatggaacaggtggaaccttatatcttcgccctcttttgattggtgtcggagatattattggggttaaaccggcagaagagtacattttcaccatctttgctatgccagttggaaattactttaagggtggattggttccaaccaacttcttgattcaggatgaatacgaccgtgcggctccaaatggtacaggtgcggctaaggttggtggaaactatgctgcaagtctcttgccagggaaattggccaagtcacgtcatttctcagatgttatctatctagacccatcaactcatacaaagattgaagaagtcggctcagctaacttctttggaattacagctgataatgaatttgtaacaccattgagtccttctatcttgccatctattaccaagtattctttgctttatttggcagaacatcgcttgggcttaactcctattgagggggatgtcccaattgataaccttgaccgttttgtagaggcaggtgcctgtggtacagcagcagttatttctccaattggtggaattcagcacggtgatgatttccatgtgttctatagcgaaacagaagtaggtcctgtgactcgtaaattatatgatgaattgacaggaattcagtttggcgatattgaagcgccagaaggttggattgtaaaagtagattaaaataaactaaaggagattttttatgaaatcgaaaaagtggctcttaacagcaggagtggtcctgagcacaacagctcttttagtagcttgtggaaaagctgataaagaagcagatgcaccgacaacattttcatatgtctatgcagtagatccagcatctttggactatagtatagcgactcgtacatctacaacagatgtcatcgggaacgtggttgatggtttgatggaaaatgaccaatacggaaatgttattccttccttggctgaagattggtctgtgtcaaaagatggtttgacttatacctacaaacttcgtaaaggagttaaatggtacacttctgaaggtgaagaatatgcagaagtaacagcccatgactttgtgacaggactaaaacacgtagctgacggtaagtcagacggtgtctctctcatccaaaattcaatcaagggcttggatgcctacatgactggtgagaccaatgatttctctacagttggtgttaaggccttggacgattatacagttgaatataccctaaacaaaccagaaagcttctggaactctaaagtcaccacagcaacgatgttgcctgtaaatgaagagtttttgaaggcatcaggtaaagattatggagcagttactccagcagggattctttacaatggtccttatatcttgaagaccttgacttctaaatcgttgatcgaatacgagaaaaacccaaattactgggataaagaaaaggtaaaaattgaaaaggtcaaattgacttactacgatggttctgatcaggaatcgttgattcgtagcttctcttcaggtgcctatacgacagcccgtctcttcccaagtagctcaaactttgcttcaactttggaacaatacggagataaaatcacttatagcccacaggactcaagtagttattacttcacctttaacgtaaatcgtcaatcatataataaaactgcgaaaacaagtgaagagcaaaagacttctactaaagaagctatgcttaataaggacttccgtcaggctatcaactttgccttcaaccgccattcttatgctgcccagctaaatggtgaagacggtgcggacaagattattcgtaacagcctcgttcctgacaactttgtacaagcaggtggtaaaaactttggtcaaatcgctcaagcagagttggtgaactatggtgaccaatggaaagatgttgagctagttgacggtaaggattctatctacaatcctgacaaggctaaagctgctttcgaaaaagctaagaaagacttggaatctaaaggggtaacattcccaattcacttggatgtcccagttgaacaaacagataccatcgctgttcaacaaagcaactctttcaaacagtctattgaatcaactcttggtgctgaaaatgttgttatcgacgttcttcaaatgacagataatgaaaaggaaacaatcacttctcaagcgcgtgttccttctcaaaaagattatgatttgaacagtacaggatgggctccaagctatcaagacccagcatcttacttgaatatcatggatcctaaatcaggttctgctatgaaacaccttggtattactaaagggaaagataaggatgttgtagctaaacttggtttggaccaatataagaaattattggatgatgcagattcagaaactacaaatcttgaagaacgctatgaaaaatatgccaaggctcaagcttggttgacagatagttcattattgatgccaacagcctcatctggtggttctccagttgtaagtaatgtcgtgccattctcaaaaccatactcacaagttggtattaagggtgacccatatatctttaaaggaatgaaattgcaaaaagatattgttacaacaaaagaatatgaagaagcactgaaaaaatggcaaaaagaaaaattggaatcaaatggtaagtaccaaaaagaactagaaaaacacattaaataatgcggaaaactctatatcggacaagcccgatatagagttttttcttgctagttttgggattttcttgtaaaatagaaaaagtgaagagaggtatgaaatgagtaagaaagayaaaaaaattgaaattcaagtagcagatgccaaggttaatgtaggaaaagacagttttgaaggctatacattgacaattggtaaaaaagttatcggagaaattgccgaattagacggacaatttgccatcataaagaatggaaacgtcgatagtttttataaaaaattggaaaaagctgtggaaattttgattgaaaattataatttagcaaaataagtcttgtttttttgaaattttcatgatataataatccatgttgattgtaggagagatagcgaagaggctaaacgcggcggactgtaaatccgctccttcgggttcgggggttcgaatccctctctctccatttcatcaatggggtatagccaagcggtaagrcaagggactttgactccctcatgcgttggttcgaatccagctaccccagttcttaggtaatgatcaagataaaaagcaaaatatcttagggtattttatttttataattgaaagacgtgaacgatatgaacatgtccttgcgggtgcttaggaaaaaaattataagtatgtcaagtttaagaaaaacttgattgttggaggattttttagatgaacgaatttgaagatttgctaaatagcgttagccaagttgagactggtgatgttgttagtgctgaagtattgacagttgatgcgactcaagctaacgttgcaatctctggaactggtgttgaaggtgtcttgactcttcgcgaattgacaaacgatcgcgatgcagatatcaatgactttgttaaagtaggagaagtattggatgttcttgtacttcgtcaagtagttggtaaagatactgatacagttacataccttgtatctaaaaaacgccttgaagctcgcaaagcatgggacaaacttgttggtcgcgaagaagaagttgttactgttaaaggaactcgtgccgttaaaggtggactttcagtagaatttgaaggtgttcgtggatttatcccagcttcaatgttggatactcgtttcgtacgtaacactgagcgttttgtaggtcaagaatttgatgctaaaatcaaagaagttgacgctaaagaaaaccgcttcatcctttcacgtcgtgaagttgttgaagcagctacagcagcagctcgcgctgaagtattcggtaaattggctgttggtgatgtagtaactggtaaagttgcacgtatcacaagtttcggtgctttcatcgaccttggtggtgttgacggattggttcacttgactgaattgtcacatgaacgtaacgtatcaccaaaatcagttgtaactgttggtgaagaaattgaagtgaaaatccttgatcttaacgaagaagaaggacgcgtatcactttcacttaaagcaacaacacctggaccatgggatggcgttgagcaaaaattggctaaaggtgatgtagtagaaggaacagttaaacgtttgactgacttcggtgcatttgttgaagtattgccaggtatcgatggacttgttcacgtatcacaaatttcacacaaacgtattgaaaatccaaaagaagctcttaaagttggtcaagaagttaaagttaaagttcttgaagttaacgcagatgcagagcgcgtatcactttctatcaaagctcttgaagagcgtccagctcaagaagaaggacaaaaagaagaaaaacgtgctgctcgtccacgtcgtccaaaacgtcaagaaaaacgtgatttcgaacttccagaaacacaaacaggattctcaatggctgacttgttcggtgatatcgaactctaatcaaattgaaaatacacaaaatcctttgtttacttaacaagggatttttcttttgtctgtaagtcttttttgatataatagttctatgttagaatcagaaaaacaatcacgttatcaaatgttaaatgaagagctctcttttttattggatggtgaaaccaatgttttggctaatctttccaatgccagcgctcttctaaaatcacgcttccctaataccgtatttgcaggcttttatctgttcgatggaatggaattggttttaggtcctttccaaggcggtgtttcctgtatccgtattgcacttggaaaaggtgtttgtggggaggcagctcactttcaggaaacggytctagttggtgatgtaaggacttatcccaactatatttcttgtgatggtcgagctaaaagtgaaattgttgttccgatggttaagaatggtcaattgctcggggttctggatctggattcttcagagtttgatgattatgatgctatggatcgagattatttggaacaatttgtcgctattttgcttgaaaagacagaatgggactttacaatgtttggggagaaagcctaatgtatcaagcactttatcgaaaatatagaagtcaaaacttctcccagttggttggtcaagaagttgtggctaagactcttaaacaagcggtggagcaagagaaaataagtcatgcttatcttttttctggtcctcgtggaacgggaaaaaccagtgtagctaagatatttgccaaggctatgaactgtccaaatcaagtgggtggggaaccttgtaataactgctatatttgtcaggcagtgacggacggtagtttagaagatgtcatcgaaatggatgcagcttctaataatggggtcgatgaaatccgtgaaattcgtgataaatctacctacgcccctagtcttgcccgttataaggtttatatcatagacgaggttcacatgctgtctacaggagcttttaatgcccttctaaagacgctggaagagccaacacagaatgtggtctttattttggccactactgaattgcacaagatacctgctacgattctatctcgtgtgcaacgttttgaatttaaatcaattaagacacaggatattaaggagcatattcgctatatcttagacaaagaaaatatcagttctgaaccagaagctgtggaaatcattgctagacgggctgaaggtggaatgcgggacgccttgtctattttagatcaagccctgagtttaacacagggaaatgagctgacgactgctatctctgaagaaattactggcacaattagtctatcagccttggatgattatgtggctgccttgtctcaacaggatgttcccaaggctttgtcttgcttgaatcttctttttgacaatggtaagagcatgactcgttttgtgaccgaccttttacactatttaagagacttgttaattgttcaaacagggggagaaaacactcatcatagtccagtctttgtagaaaatttgacacttcctcaagaaaatctgtttgaaatgattcgcttagcgacagtcagtttagcagatattaagtctagtttgcagcctaagatttatgctgagatgatgactatccgtttggcagagattaagcctgaaccagctctttctggggcagttgaacatgaaatttctgcattgagacaggaagttgcgcgtcttaaacaagaactcgcaaatgtgggaactgtacccaagacaacaagtccagcacctagtcgcccagcagcaggccagacagtctatcgtgtggatcgcaataaagtgcaatctatcctacaagaggccgtcgaaaaacctgatttagcacgtcaaaacctgattcgtttgcagaatgcctggggagaagtgattgaaagtcttggtgggccggacaaggctttgctagttggttctcaaccggttgccgccaatgagcaccatgctattcttgcttttgagtctaacttcaatgctggtcaaaccatgaaacgggacaatctcaacaccatgtttggtaacatcctcagtcaggcagcaggtttttcacccgaaattttagccatttccatggaggaatggaaagaagttcgagcagccttttcagccaaagccaaatcttctcaaactgaaaaagaagcagaagaaagtctgattccagaaggatttgaatttttggctgataaagtgaaggtagaggaagactaaagaaagatttcatgatacaataagtttatgaatagacaacaatttattatcattgcgctgtttacagctgctgagacctattttttcaatgaagcttggatgactggtcgttatattatggcagccttttgggccattttgctctttagaaattttcgagtaagttacttgatgggcaaaatagtggatgtcattgaccagcatttaaaaggaaaagactagtcctcagcttctagacaaaatcaaagccttttaggcttttttttgttatactataaaagtatatttattgaccttttaccgtattttctagggaaatcaagtatgtttccagtaagaactgtaaaggccttgaaaaagaaaggaactatcatgtcagtattagagatcaaagatcttcacgttgagattgaaggaaaagaaattttaaaaggggttaacctgaccctgaaaacaggagaaatcgccgctatcatgggaccaaatggtacaggtaaatcgactctttctgcagctatcatgggaaatccaaactatgaggttaccaaaggtgaagtcttgtttgatggcgtaaacatccttgagttggaagttgacgagcgtgcgcgtatgggacttttccttgctatgcaatacccatcagaaattcctggaattaccaatgctgagtttcttcgtgcagccatgaatgctggtaaagaagacgatgagaagatttcagttcgtgagtttatcactaaattggatgagaagatggaattgctcaacatgaaagaagaaatggctgagcgttacctcaacgaaggtttctctggtggtgagaaaaaacgtaatgagattcttcaacttttgatgttggagccaacatttgcccttttggatgagattgactctggtcttgatattgacgctcttaaagttgtgtctaagggtgttaatgccatgcgtggtgaaggctttggtgctatgattatcactcactaccaacgtcttttgaactacatcacaccagacgtggtacacgtgatgatggaagggcgtgttgtcctttcaggtggtccagaattggctgcacgtttggaacgtgaaggatacgcaaaactagctgaagaacttggctacgactacaaggaagaattgtaattccctcgtatcttttaggagaagtaaatgactaaagaaaatattaaacttttttcagaaatgcacgctgaaccaagctggttggctgacctccgtcaaaaagcttttgataagattgagagtttagagttaccagttattgagcgtgtcaaattccaccgttggaatctgggtgatgaaacgattacagaaagtgagccatcagcaaatgttccagatttcactgcactagataatcacttgaagttggtgcaagtaggaactcaaactgtttttgagcaaattccagttgagttggctgaacagggtgtcgtctttacagacttccactcagctttagaagaaattccagagcttattgaagaattcttcatgtcatctgttaagtatgacgatgacaagttggcagcctaccatacagcttatttcaacagtggtgctgttctctacattcctgataatgttgagattaaagaaccaatcgaaggaattttctatcaagatagtgatagcgatgtgccgtttaacaagcatattatgattatcgctggtaaaaattctaagattagttatctggaacgtttagagtcacgcggtgaaggaagtgccaaagcaactgctaatatcacagtagaagtaattgcacgttctggtgctcaagtgaagtttgctgctatcgatcgtttaggagaaaacgtcactgcctacattagccgtcgtggtaaattaggcaacgatgcaagcattgactgggcaatcggtgtcatgaacgaagggaacgtcgttgcggactttgatagtgacttgattggtaacggtagccatgcagatctcaaggttgtagctctttcaagtggtcgtcaggtacaagggattgatactcgagtgactaactatggttgcaactcaatcggaaatatcctacaacatggggttattcttgaaaaagcaactttaactttcaacggtatcgggcacattatcaagggggctaagggagcagatgcgcaacaagaaagtcgtgttctcatgctttcagaccaagcgcgttcagatgccaatccaattcttttgattgatgaaaatgacgtaactgcaggacatgcggcttctatcggtcaggtagatccagaagacatgtactacctcatgagccgtggtttagataaggcaactgcagaacgtttggttgttcgtggtttccttggctccgttatcgttgagattccagtcaaggaagttcgtgatgaaatgattgcaactatcgaagaaaaattgtcaaaacgctaaggggtagcctatgttagatgtagaagtgattcgcaaggattttccaattttagaccagattgttaatgatgaaccattggtttatttggacaatgctgcgacgacacaaaaaccactagcagttctggagacgattaaccgctactatgagaacgacaatgccaatgttcatcgtggcgttcataccttggcagaaagagcgacagcttcttatgaagccgctcgtgaaactattggtgagtttatcaatgcagggtctacaaaggaagttctctttaccagaggaacgacaaccagtctgaactgggtggcacactttgcagaggaagtcttgactgagggagaccaggttttgatttctgtcatggaacatcattccaacatcattccttggcaggaggcctgtcgcaagactggagcagagcttgtctatgtttatctcaaggacggagctctggatatggatgatttgcgaactaaattgactgacaaggtcaagtttgtttcgctagctcacgcctccaatgttcttggtgtggttaatcctatcaaagaaatcactcaattggcccatcaagttggagccatcatggtggtggatggtgctcaatctactcctcatatgaagatcgatgtccgggacttggatgtggacttctttgccttttcaggtcacaagatggctggtccaactggtattggtgttctttatggtaaagaaaagtatctggaacaaatgtcaccagtagaatttggtggtgagatgattgattttgtctatgagcaatctgctagttggaaggaattgccttggaaatttgaggctggaactcctaatatggcaggtgcaattggacttgctgcggcagtggattatctggaaaagattggtatggatgccattgaagctcatgaacaggaattaatcgcatacgtctatccaaaactgaaggcgattgaaggattgaccatttatggttcgcaggacttggctcaacgttcaggtgtcattgcctttaacctaggtgaccttcatcctcacgaccttgcgactgctttggattatgaaggagtggctgttcgagcaggtcaccactgtgcgcaacccttgctccagtatttggatgttccagccacagctcgtgcaagtttttatatctacaataccaaggcagattgcgataagctagtcgatgccttacaaaagacaaaggagtttttcaatggcactttctaaactagatagcctttatatggcagtggtagcggaccattcgaaaaatccacatcaccaagggaagttggaagatgctgagcaaatcagtctcaacaatccgacttgtggggatgttatcaatctctctgtcaagtttgatacagagaatcgtttggaagatatcgcttttctaaactcaggttgtaccatctcaactgcctctgcaagcatgatgacggacacagttttaggaaaaaccaaagaagaaattttagaacttgcgactattttttctgaaatggttcaagggcaaaaagatgaacgccaagaccaactaggcgatgcagctttcttatcaggcgttgcaaaattccctcaacgaatcaagtgtgcaaccctagcttggaacgctttgaagaaaacaattgaaaatcaagaaaacaagtaaggcaagtttcttttgtcttatgaatcagtagaaatgaagaatgaaagaaaggatattatggctgaagaaagagtagaaccaaaaccaattgaccttggtgaatataaatttggtttccatgatgatgtagagcctgtcctatcgacaggaaaaggattgaatgaagatgtcattcgtgaactatcagctgctaagggagaacctgagtggatgctagaattccgtttgaagtcttatgaaaccttcaaaaaaatgcccatgcaaacttggggagcagacttgtcagagattgactttgatgacttgatttattaccaaaaaccatctgataaaccagctcgttcatgggatgaggttcctgaaaaaattaaagaaacctttgaacgtatcgggattccggaagctgagcgtgcctatctagcaggtgcctctgcccagtatgagtcagaagtggtttaccacaacatgaaggaagagttccagaagttggggattatctttacagatacggattctgccctcaaggaatacccagacttgtttaaacaatactttgctaagttggtaccgccaacagataacaaattggctgcccttaactcagcagtatggtctggtggaacctttatctacgtaccaaaaggggtcaaggtagatattcctcttcaaacttacttccgtatcaacaacgagaatacaggtcagtttgaacgtaccttgattatcgttgatgagggagcaagtgtccattatgtagaaggatgtacagcgccaacttattcaagtaacagcttgcacgctgccatcgtagaaatctttgccttggatggagcttatatgcgttatacgactatccaaaactggtctgataacgtctataacttggtaaccaaacgtgctaaagctcaaaaggatgccactgttgagtggattgatggtaacttgggtgctaaaacaaccatgaaatacccatctgtttacctagatggagaaggggcgcgtggtaccatgctctctattgcctttgccaatgcagggcaacaccaggacactggtgccaagatgatccacaatgctccacataccagctcgtctattgtgtctaaatccatcgctaaaggcggaggaaaggttgactaccgtggacaggtaacttttaataagaactctaagaaatctgtttctcacatcgagtgtgataccattatcatggatgacttgtcagcatcagataccattccgtttaacgaaattcacaactcacaagtcgctttggaacacgaagctaaggtatctaagatttcagaagagcaactctattacctcatgagccgtggattgtcagaatctgaagcaactgagatgattgtaatgggatttgtagaaccctttacaaaagaacttccaatggaatatgcagttgagctgaaccgcttgatcagctacgaaatggaaggatcagttgggtaaaatttgattttagatttacccaaggtcaagaactttgaagatgaacttctaacaaaaaatcgcggtttaaaatcgcgatttttttataatttttcgttgatgaagcggataaactgattccaccaaacttttaagaagaaggctttttcaactttcttttctgctaccatttcaaaactaggacgttctgtagtgatgtaaccttgaccaatcaaatcattgtcttcataagttaaatgaccaaccactgttccggcttcaagtggtgctgggattgctttagaatcaggtgtgaattgaacagattgagaagattgacccccaacacgttcaattagagagatatcatctttggcaatagcagtgactgtatcttcttttccatcttgtacaggggctttactatcttggtaggcatcgcctttttgaacgattttacgaagtgtgaatgtagaagagatataatccattagtgaagatgtagctgtgaagcgagcgtaaggattattgtcttgatgatctgcattcaaaacaactgtgataaccctcatccctttttcaacagtagtaccaacaaaagattctccagccttgtctgttgttcctgtcttaaggccatcaaaaccaccgcgataagcaggcataccctctaacatgtagttggtagaagtgattgtcattccagcaaaagtagaagaaggttttttcgtgatttccaagacttgtgggtattttttgatgaggttgcgagcaacgatagcgacatcataagcactgagcttattttcctcatcttttttagaacctgggtaaatgttatcccctagagtctcattgttaagacccgtcgtattaacaacagtggcatcctgaattccccattccaagagttttgcgcgcatcatatcgacgaaatctttttctgagccagcaattttctcagctagggcaatagccgcactgttagcactagatactagggttgcttcaagtagttgttcgacggtgtaattacgagcctccataggaacgttactcgcttcagaatttgtcgttaatttgtaaggataatcagaaatatctaccggagttgatagtgtaatactgccattttccaaggcttcatagacaagataaacagtaattaactttgtgattgaagcaatttcaactggctgggttgcatctttctcatagagaattttaccagtattcgcctcaacggcaattgcatgtttagcagcaatattaaaatcttgagcagcaacagtagatgctgagccaataacggaaaggcttaaaagagttaaaattatttttttcatagtaagtttattctatcataaagaaaaaaatattcccagtttcatgatataagaaagaagcttttttgaaagtgtggtaaaatagatgaatggaggtacctcatgtttcgtaagaataaattatttttttggaccagtgagattttactattaaccattatcttttatttatggagagagatgggagcgattattacaccttttgtaagcgttgcaaacactataatgattccctttcttttaggtggttttttatattatttgaccaatcctattgtaaattttttacaaaagtatttcaaaattaaccgtatcattggtattctactaaccttgtgcgccttggtttgggggctagttattggggtagtctatctcttaccgattttgattaatcagctgacaagtttgattgcaacaagtcagacaatttatagtcgtttgcaagatttgattgtggatttatcywmytwwycmrscyttymaaawttwrrwwwtymarssrmsrwtymammrktwaawyyyyycywwkkwrrwawtyywmmrrawatycywaawwgkkkaamsratwrkgttggragtgtcctwtctgcgctctttagtacygttttgattattatcatgacccctgtatttttaatttattttttgttagatggtcacaagttcttgccgatgcttgaacgtactgttttaaagcgagacaagttgcatattacaggtcttttaaaaaatttgaatactacaattgctcgatatattagtggagttgctattgatgcgattattattggttgtttggcctttatcggatatagcgtaatcggtttgaaatacgctttggtcttcgctatcttttcaggattagccaatctcattccttatgtaggcccaagtattggtttgattccgatgattatcgctaatgtctttactgatcctcatagaatgctgattgcagttgtttatatgctgattattcaacaagtggatggaaatattctttaccctcgaatcgttggtggtgtgatgaaggttcatccaattacgattttagtattacttttgttatcaagtaatatctatggtgtcattggtatgattgtcgcagtaccaacctattctatcttaaaagaaatttctaagtttttatcacgcttgtatgaaaatcataaaataatgaaagaacgagaaagagaattagctaagtaaaagtcaggaaattcctgatttttctttttcattaaagaagtgataggagtagaattaccgtttagattagcagattaagaataattcacaaaaactttgtaaaacacttgcaatttagctgaaatttgataaaatagtaaggaaagttagactgtattgcctactgtctatctataaaatatattttattggaggcttttactcaaatggcaaaagaaaaatacgatcgtagtaaaccacacgttaacattggtactatcggacacgttgaccacggtaaaactactttgacagcagctatcacaactgttttggcacgtcgcttgccttcagctgttaaccaacctaaagactatgcgtctatcgatgctgctccagaagaacgcgaacgtggtatcacaatcaacactgcgcacgttgagtacgaaactgaaaaacgtcactacgctcacatcgacgctccaggacacgcggactatgttaaaaacatgatcactggtgccgctcaaatggacggagctatccttgtagtagcttcaactgacggaccaatgccacaaactcgtgagcacatccttctttcacgtcaggttggtgttaaacaccttatcgtcttcatgaacaaagttgacttggttgacgacgaagaattgcttgaattggttgaaatggaaatccgtgacctattgtcagaatacgacttcccaggtgacgatcttccagttatccaaggttcagctcttaaagcccttgaaggtgacactaaatacgaagacatcgttatggaattgatgaacacagttgatgagtacatcccagaaccagaacgtgacactgacaaaccattgcttcttccagtcgaagacgtattctcaatcactggtcgtggtacagttgcttcaggacgtatcgaccgtggtatcgttaaagtcaacgacgaaatcgaaatcgttggtatcaaagaagaaactcaaaaagcagttgttactggtgttgaaatgttccgtaaacaacttgacgaaggtcttgccggagataatgtaggtgtccttcttcgtggtgttcaacgtgatgaaatcgaacgtggacaagttattgctaaaccaggttcaatcaacccacacactaaattcaaaggtgaagtttacatccttactaaagaagaaggtggacgtcacactccattcttcaacaactaccgtccacaattctacttccgtactactgacgttacaggttcaatcgaacttccagcaggtactgaaatggtaatgcctggtgataacgtgacaatcgacgttgagttgatccacccaatcgccgtagaacaaggtactacattctctatccgtgagggtggacgtactgttggttcaggtatggttacagaaatcgaagcttaattcgatttagttcccagaagaacaattatttaagtcagacactaaaagaatcttgctatgcaaggttctttttttctgatattgaactaaaattgaagaattgtacacaaaaaagctctatacacttgatgggcatagagcaaacggagctttatctgatatagagttcttggtttttcaagacaatttcacgtacgcttgcaaactttttgagttttttgatttcttctggatgagtgacgagagtgataacatagccttctttacccatgcgacctgtacggccagcacggtgagtgtaggtttcaatatctctaggaacatcaaagtttacgacacattctaggctatcgatatcaattccacgtgccagaaggtctgttgcaagaagtagggttagttgcttgtctttaaacttttctaagatgacttttctaaatttgacattgacatcactagcgagggaaacagccaggatatcccgatattgtagtttttcttctgcacttccaaggtctgataggctgttaaagaagactagaccacggaaatcctctacatgagccagttttcgtagcatatccactcggtgacgttgctctacctgcatgtagaagtgctggatgttgtccagtttttgatcagagagattaatggtacgtgtgttaggcgcaatcttcttttggtcaaacttggttgtcgcactcatatagacaagttggtggtcacgaggtgcgtagtgagtaattttctcgacaaagtgtatctgagaatcatctagtaattggtcgaattcatccaggatgatggtttccacattcatcatcttgatttttttcaatttaatcagttcaaagatacggccaggggttccaatcagaatttctggtccttttttgagtcgttcaatttgacgtttttgactcgaacctgataagaagagttgggtagttaagcagatagcttcagcccacgttttacatacatcaaaaatctgtccagcaagctcagtatttggtgctagaatcaagagttgttggttttttttcttttgtagtctgagaagacttggtagaaggtaagctagggtcttaccagttcctgttgggctcactcctaggaggttttctccagcaagaaggggctcaaatagttgggtttgaatgggagtgaattcttggaaaccgagttggtcactcagttcttgccattcagtcggtagtttgtttttcatttttctgcctcaaatctaatgccagcagtctggcgcatggtaaatagtagttcatgaacaaaacttgcatcttccaaccaagtttggtagagattcagatctggttgctggatcatgtgtgcaaatgcagcgacttcctcagtcattgtatgaggagcctgttggatagggagttggacttgattgccttgatggtcggtaaaaatagccgagcgaacatgctcaatcgtgttgagagtcaaggttccatctgttgtgtaaatttcgcaaggaagattggaagtgatgtttttcccagccttgatgtgaacttgaaagtctgggtagaagaggatgccatcgccatttaggtcaatgctattgtcaagctgttgagcctgataggtcacatccttagcttttccaaagagacgaacggcagcgtagaggggataaatccccaaatccataagagctccaccagcaaaacgatctgaaaagacatttggtgtctgtccagccaacaagttaggcattttggaagaatacttggcatagttgaaatctgctcccaaaattagtttgtctgctaaaaagtttttgatgatagtgaaagctttttcatggtagttccgtgccgcttcgaagataaaacagtgatttttctcagctgtatgtctcaaatctagccattcttgtggatgagtgacagctggcttttcaagaatgacgtgcttaccagcagacaaggcagccttggcttgaacaaaatgcaaggagtttgggctagcaatatagaccacatcaaaggagctcttgaagaagtcctctacttgatcaaagagttggatattctgatagcgagaagcaaaggttgccgcagtttctagttttctagaatagattgcgaccagcttgtattctccactggaatgggctgcttctatgaagtggtggctgatagcccctgttccgatgatacctaatttaagcatagtgactccttttccgatttcaaatccttctttcattataacatagatagacgggactatccaacagaggggaaaaaatttcaaataatctactaggtcttttccaaagaaagtggtacaataatgagatgagtaaatgaaatgggagggaaaatgaggttattacctataagaaaaatatcacgtcagtctaagaggctagcgctttttttgactttttgtgcaggatatgtagacgcctatacttttattgtgcgagggaatactcttgtagctggacaaactgggaatgtcgtctttctatcagtggggctcattcaacacaatgtttcagatgctagtgccaaagtaatgaccttgctagcttttatgatgggggtctttttactaacgatttataaggaaaaattga

SEQ ID NO: 61 - DNA, 84457 bp, Streptococcus mitis NCTC 12261 contig7
tgaaaaagccaattctgtcactgattcctttggcaatcttatcaatcattattggttttgtgccgcaaactgtagataatatctatctagtaccgccattagccttttgtatgggcttggtgacaactgcttttggtgaggtttcgggtattgcctataataacgcgtttatgacagggaatatcaaacggaccatgctggcttttggagattattttcggaccaagcacactccttttttacgtgaagggattatctttgttagcctgcttagtagttttgtccttggcgttgtcttttcagcttatttgacgattttctatcatgaaaagaccattcttggtgttcctattatgatgagcattttttacctcagcatgctttttgcctcttggcagaaaaaagtaaaagaaaaagcttcattttaggtgttattacttgtaagaaaataggagatatgctatacttgaagagttgactatgcacgatcctgtgcaaccgcacgaacatcgttgcttgattattcaagtttaagtggtttgtcccacgatgctaggcgagtcttcacaaaaaattcggggaaacccataaaaatcataggaggtgcataatgagcacatacgcaattatcaaaactggcggaaaacaagttaaagttgaagttggtcaagcagtttacgttgaaaaattgaacgttgaagctggtcaagaagttacttttaacgaagttgttcttgttggtggtgaaaacactgttgtcggaactccacttgttgctggagctactgtagttggaactgttgaaaaacaaggaaaacaaaagaaagttgttacttacaagtacaaacctaaaaaaggtagccaccgtaaacaaggtcaccgtcaaccatatactaaagttgtcatcaacgcaatcaacgcttaattttaaggagaacacatgatacaagcagtctttgagagagccgaagatggcgagctgaggagtgcggaaattactggacacgccgagagtggcgaatacggcttagatgtcgtgtgtgcatcggtttctacgcttgccattaactttatcaattctattgagaaatttgcaggctatgaaccaatcctagaattaaacgaagatgaaggtggctatctgatggttgaaattccaaaagatcttccttcacaccagagagaaatgacccagttattctttgaatcatttttcttaggtatggcaaacttatcggagaactcttctgagttcgtccaaaccagagttatcacagaaaactaacacggaggaaaacattatgttaaaaatgactcttaacaacttgcaacttttcgcccacaaaaaaggtggaggttctacatcaaacggacgtgattcacaagcgaaacgtcttggagctaaagcagctgacggacaaactgtaacaggtggatctatcctttaccgtcaacgtggtacacacatctacccaggtgtaaacgttggacgtggtggagacgatactttgttcgctaaagttgaaggcgtagtacgctttgaacgtaaaggacgcgataaaaaacaagtttctgtttacccaatcgctaaataaaaaggtccagtgaacctttttatcccgagccttgaatataaaggcgaggaagctagaagtagcataaactaaggctttccgagttttcggagagcctatttttttattttgatacccacgctgatacccatattttaaaaaccaatgtaagaagcgaacttgtcggctactttgtcttttagatacaattataaaatagtggaatgtgagccttttacagtaatgaatgttataagggaataagatattgtaaaaattgctaagatttgatattataattgtatctgagtaaggaagcaggaatatggaaaggagtgagcctatatgaaaaaattatcataatgatagtctgttcaatctcttttcttgttttatctgcttgcgttagtaacaaaaaacttattcttcctgaacctgaaacgatctctgtaatttccctgcagaaaacaatctctgaagatattaaaactataaccaagagagaagaaatctcaaaattgattgaggagatacagaaacagtccaaatctacaactttggagagtttcaatgatcaaccgacaaatgttaaagattacatcattatcaaattcactcatcagaatgaagaaaatgatagtgtagcctatctatatactatgaaagaaaaacagtatattgagcaaccctatgttgggatttgggaggtaagtccagatatagcgaatagggttgaagaagcttattctagttgatttatagaataaaagaaatttttagagagttttcttgtatcatgttttaaacggtaaatcaacaagatttgctgtttttatttgtttgaaataaaatgaggactgaaaaaagatatcattctaattcttgtattggggtattagagtattcgcttagacttgaaaatttccagacttttttcctttttggaaaacttctaaaatatggtataatgaaaagataaagaagttgggggtagaagatgaacattcaacaattacgctatgttgtggctattgcgaatagcggtacttttcgtgaagctgctgaaaagatgtatgttagtcagccgagtctgtctatttctgttcgtgatttggaaaaagagttgggctttaagattttccgtcggaccagctcagggactttcttgactcgtcgtggtatggaattttatgaaaaagcgcaagaattggttaaaggatttgatatttttcaaaatcagtatgccaatcctgaggaagaaaaggatgaattttccattgctagtcagcactatgacttcttgccaccaaccattacggccttttcagagcgctatcctgattataagaactttcgtatttttgaatcaactactgttcaaattttagatgaagtagcgcaagggcatagtgagatcgggattatctacctcaacaatcaaaataaaaaaggtattatgcaacgggttgaaaagctaggtctggagatcattgaattgatttccttccatacccacatttatctccgcgaggggcatcctttggctcagaaagaggaattggttatggaggatttagctgatctaccaacggttcgtttcactcaagaaaaagacgagtacctttattattcagagaactttgttgataccagtgcgagctcgcagatgttcaatgtgacagaccgtgctactttgaatggtattttggagcggacggacgcttatgcaacaggttccggatttttagatagtgacagtgtcaatgggattacagtcattcgtctcaaggataacctagataatcgcatggtctatgttaaacgtgaagaagtggagctgagtcaagctgggactctctttgtagaagtcatgcaagaatattttaatcagaagaggaaatcatgaaaaaaagaggaatagtggcagtcattgtactacttttgattgggcttgatcagttggtaaaatcctatatcgtccagcagattccactgggtgaagtacgctcttggattcccaatttcgttagtttgacctacctgcaaaatcgaggtgcagccttttctatcttacaagatcagcagttgttattcgctgtcattaccctggttgtcgtggtaggtgccatttggtatctacataaacacatggaggactcattctggatggtcttgggtttgaccttgattatcgcaggtggtcttggaaactttattgacagggtaagtcagggctttgttgtggatatgtttcacttggactttatcaattttgcaattttcaatgtggcagatagctatctgactgttggagtgattattttattgattgcaatgctaaaagaggaaataaatggaaattaaaattgaaactggtggcctgcgtttagataaggctttgtcggatttgacagaattatcacgtagtctcgcgaatgaacaaatcaaatcaggacaggtcttggttaatggtcaagtcaagaaagctaaatacacagttcaagagggtgatatcgtcacttaccatgtaccagagccggaggtcttagagtatgtggctgagaatcttccgctagatatcatctaccaagatgaggatgtggccgtcgttaacaaacctcaggggatggtggtgcatccgagtgctggtcatactagtggaactctagtaaatgcccttatgtatcatattaaggacttgtcgggtatcaatggggttctacgcccaggaattgttcatcgtattgataaggatacgtctggccttctcatgattgctaaaaacgatgaggcgcatctagcacttgcccaagaactcaaggataaaaagtctctccgaaaatattgggctattgttcatggaaatctgcctaatgatcgtggtgtgattgaagctccgattggccgtagtgaaaaagaccgtaagaaacaggctgtgactgctaaagggaagcctgcagtgacccgtttccacgtcttggaacgttttggtgattacagcttggtagagttgcagctagagacaggacgcactcatcaaatccgtgttcacatggcttatattggccatccagtcgctggtgatgaggtctatggtcctcgcaagactttgaaaggacatggacaatttctccatgccaagactctaggctttacccatccgagaacaggtgagaccatggaatttacagcagatatcccagagatttttaaggaaacattggagagattgagaaagtaagaatgaaaaagaaattaactagtttagcacttgcaggtgcttttttatgcttgtcatttcatgggaatgttcaagctcaagaaagttcaggaaataaaatccactttataaatgttcaggaaggtggcagtgatgcgatcattcttgaaagtaatggacattttgccatggtggatacaggagaagattatgatttcccagatggaagtgattctcgttacccatggagagaaggaattgaaacatcttataagcatgttctgacagatcgtgtttcgcgacatttaaaggaattgggtgtccaaaaacttgattttattttggtaacccatacccatagtgaccatattggaaacgttgatgagttactgcaaacctatccagttggtcgtatctacatgaaaaaatactctgatagtcggattacaacaccaactcatctatgggataatctgtatggctatgataaggttttacagacttctgcagaaaaaggtgtttcagttattcaaaacattacacaaggagatgctcattttcagtttggggacatggatattcaactctataactatgaaaatgaaactgattcatcaggtgaattaaagaaaatttgggatgacaattctaattctttgattagtgtagtgaaagtcaatggtaagaaaatttacctcggaggagatttggataatgctcatggagcagaagacaagtatggtcctctcattggaaaagttgatttgatgaagtttaatcatcactatgataccaataaatcaaacaccaaggatttcattaaaaatttgagtccgagtttgattgttcaaacttcggatagtttaccttggaaaaatggtgttgatagtgagtatgtcaattggctcaaagaacgaggaattgagagaattaacgcagccagcaaagactatgatgcgacagtttttgatattcgacaagatggttttgtcaatatttcaacttcttacaagcagattccaagttttcaagctggttggcataagagtgcttatggaaactggtggtatcaagcgcctgactctacaggagaatatgcagttggttggaatgaaatcaagggtgaatggtattacttcaaccaaacgggtatcttgttacagaatcaatggaaaaaatggaacaatcgttggttctatttgacagactctggtgcatctgctaaaaattggaagaaaatcaatggaagctggtattatttcaacaaagaaaatcagatagagactggttggcttaatactggcggtcagacctattatctatcaaatgatggggatatgataacaggatggcgtaagattgatggacaatggtactattttgctcaatcaggggaaatgaaaacgggctgggtaaaagataaagaaacctggtactatatggattctactggtaccatgaagacaggcgagatagaagtttctggtcatcattactatctagaagaatcaggagctatgaagcaaggctggcttaaaaaggcaaatgattggtatttctataaggaagacggttcacgagctgttggttggattaaagacaaggataaatggtacttcttgaaagaaaatggtcaattacttgtgaacggtaagacaccagaaggctatactgttgattcaagtggtgcctggttagtggatgttccggtagagaaatctgctacaactagagatacaagtaactcagaaataaaagaatccaatgaagtagtgaaaaaagatcttgaaaataaagaaacgagtcaacacgaaagtattacaagttcttcaactagtcaagatttgacttcttcaacttcacaaagcactgaaacaagtgcaaataaatcggaatcagaacagcagtaaaaaagaaggttttagggccttctttttcctatcaactcttttctatttcctgccattcatgttataatggataaatatgaagaatcggagtgagactatgaaattcaaacggattgtctttaaggtggggacttcttctctgacgaatgaggatggaagtttatcacgtagtaaggtaaaggctattacccagcaattggctatgttgcacgaagctggtcatgagttgattttggtgtcgtcgggtgccattgctgctggttttggagccttaggatttaaaaagcgtccgactaagattgctgataaacaggcctcagcagcggtaggacaagggcttttgttggaagaatacacgaccaaccttctcttgcgccaaatcgtttctgcacaaatcttgctgacccaggatgactttgtggataagcgccgttataaaaatgcccatcaggctttgtcagttctacttagtcgtggggcaattcctatcatcaacgagaatgacagtgtcgttattgatgagctcaaggttggggacaatgacactcttagtgcccaggtagcggccatggtccaagcagaccttttagtcctcttgacagatgtggacggtctctatactggaaatcctaattcagatccaaaagccaaacgcttggagaaaatcgagaccatcaatcgtgagattattgatatggctggtggagctggctcgtcaaatggaactgggggcatgctaaccaaaatcaaggctgcaactattgcgacagaatcaggagttcctgtttatatctgctcatccttgaaggcagatgctatgattgaggcggctgaggagaccaaggatggttcttactttgttgcgcaagagaagggacttcgtacccagaaacaatggcttgcattctatgctcagagtcagggttctatttgggttgataaaggggctgcagaagctctctcccaacatggaaagagtcttctcttatctggtgtagttgacgcagaaggggccttttcttacggtgatattgtgacagtatttgacaaggaaagtggaaaatcacttggaaaaggacgcgtgcaatttggagcatctgctttggaggatatgttgcgttctcaaaaagccaaaggtgtcttgattcaccgtgacgattggatttccattactcctgaaatccaactactctttacagaattttagaggtaaattatggtaagtacacaagaacaatttgaacaggtacaggctgttaaaaaatcgattaacacagctagtgaagaggtgaaaaaccaagccttgctagccatggctgatcacttattagcagctactgaggaaattttagcagccaatgcccttgatatggaagctgctaagggtaaaatctcagatgtaatgctggatcgtctttatttggatgcaagtcgtatagaagcaatggcaaccgggattcgtgaagtggttgctttaccagatccaatcggtgaagttttggaaacaagtcagcttgaaaatggcttggttatcaccaagaaacgtgtagctatgggagttattggtataatctatgaaagccgtccaaatgtgacgtctgatgcggctgctttggctcttaaaagtggaaatgcagttgttcttcgtagtggtaaggatgcctatcaaacggcccatgccattgtcacagccttgaagaagggtttggagacaacgaccattcatccagatgtgattcaactagtggaagataccagccgtgaaagtagctatgctatgatgaaggccaagggctatctagacctgctcattcctcgtggaggggctggtttgatcaatgcagtggttgaaaatgctattgtaccagttatcgagacaggaactgggattgtccatgtttatgtcgataaggacgcagatgaggacaaggcactgtctatcatcaacaatgccaaaactagtcgtccttctgtctgcaatgccatggaggttctacttgttcatgaagacaaagcagcaagcttccttcctcgcttggagcaagttctagttgcagagcgcaaggaagctggactggagccaattcaattccgtgtagatagcacagcaagtcagtttgtttcaggtcgagtagctgaggcccaagactttgacaccgagtttttagactatgtactagctgttaaggttgtgagcagtttagaagaagcagttgctcatattgaaacccacagtacccatcattcggatgccattgtgacggagaatgctgaagttgcagcttactttacagatcaagtagactctgcagcagtctatgtcaatgcctcaacgcgtttcaccgatggtggccaatttggtctgggttgtgaaatgggaatttctactcaaaaactgcacgcgcgtggtccaatgggcttgaaagaattgaccagctacaagtatgtggttactggtgacggacagataagggagtaaaaaatgaagattggatttattggtttgggaaatatgggagctagcttggccaaggctgttttgcaggccaagacgggtgatgaccttctccttgccaatcgcagtcaagccaaggtggatgctttcattgccgactttggcggtcaagcttctagcaatgaagaaatctttgcagaagcagatgtgatttttctaggtgttaagccagctcagttctcagacttgctttctcaatatcagaccattcttgaaaaacgagggagtcttcttttgatttcgatggcagctggattgactttggaaaaactcgctaatcttctgccaagtcaacaccgaattattcgtatgatgccgaatacccctgcttctatcgggcaaggagtgattagttatgccttgtctcctaattgcagggctgaggacagtgagctattttgtcagcttttaagcaaggctggcctcttggttgaacttggggaaggcttaatcgacgcggcgacaggtcttgcaggttgtgggccggcctttgtctatctctttattgaggccttggcagatgcaggtgttcagactggattgccacgagagacagcattgaaaatggcggctcaaacagtggtaggagctggtcaattggtcctagaaagccaagagcatcctggagtattgaaagaccaagtctgcagcccaggaggttcgactattgctggtgtagcgagcttagaagcgcatgcttttagaggaacggtcatggaggcagttggtcaagcctacaaacgaacacaagaattaggtaaataagaggtagttttgtctgcctcttttatggtggctgatactcttcgaaaatctcttcaaactgcgtcagattccatctgcaacctcaaaacagtgttttgagcaacctgcggctagcttcctagtttgctctttgattttcattgagtattaaatgagaagacaaaaaagattgtcacaaacccctattttttgatagaatagaagtagtaaaaaagaaatgagttagacatgtcaaaaggatttttagtctctcttgagggaccagagggagcaggaaagaccagtgttttagagactctgctaccaattttagaggaaaaaggagtagaggtgctgacgacccgtgaacctggcggagtcttgattggggagaagattcgggaagtgattttggacccaagtcatactcagatggatgcgaagacagagttacttctttatattgccagtcgcagacagcatttggtggaaaaagttcttccagcccttgaagctggtaagttggtcattatggaccgtttcatcgatagttctgttgcctatcagggatttggtcgtggcttgaatattgacgccattgactggctcaatcagtttgcgacagatggcctcaaacccgatttgacactctattttgacatcgaggtggaagagggactggctcgcattgctgctaatagcaatcgtgaggtcaatcgtttggacttggaaggattggacttgcataaaaaagtccgtcaaggttacctttctcttctggacaaagaaggaagtcgtattgtcaagattgatgctagttttcctttggagcaagttgtggaaactaccaaggctgtcttgtttgatagaatgggattagctaaatgaaacaagatcaactaaaggcctggcaaccagatcagtttaaccgctttgtccgtatcctagaacaagaccagctcaatcatgcctacctcttttcaggtttctttgaaagtttggaaatggcgcaatttttagctaagagcctcttttgtacagataaagtaggtgttttaccatgtgagaaatgccgaaattgtaagctgattgaacagggagaatttcccgatgtcaccttgattaaaccagttaatcaggtcattaagacagaacgcattcgagaattagtgggtcagttttcccaagcagggattgaaagccagcaacaggtttttattattgagcaagctgagaagatgcatcctaacgcagctaattctctgctcaaggtcatcgaagaaccccagagtgaggtttatattttcttcttgaccagagatgaggagaagattttaccgacaattcgaagtcggacccagattttccactttaaaaaacaagaagagaagctgatattgctcttagaacaaatgggactggttaagaaaaaagcgactctcctagcccagtttagtcaatcgcgagctgaagcagagaagttagccaatcaggcaagtttttggaccttggttgatgaaagtgaacgcctgctgacttggttagtggactaaagaaaaaagaaagttatttgcaagttgccaaactagctagcttggcagatgataaggaaaaacaagatcaggttttacggattcttgaagtcctctgtcgggaggatctcctgcaagcaagagtaagagtgattctacaagatttgctagaagctagaaaaatgtggcaagctaatgtcagctttcaaaatgccatggaatacctggtcttgaaagaaatataaactcaaagatgaatgataaagaaaggaaagggctgttttatggacaaaaaagaattatttgacgcgctagatgatttttcccaacagttattggtaaccttggccgatgtggaagccatcaagaaaaatctcaagagcctggtagaggaaaatacagctcttcgcttggaaaatagtaagttgcgagaacgcttgggtgaggtggaagcagatgctcccgtcaaggctaagcatgttcgtgaaagtgtccgtcgaatttataaagatggttttcacgtatgtaatgatttttatggacaacgtcgagagcaggacgaggaatgtatgttctgtgacgagttgttatacagggagtaagcatgcagattcaaaaaagttttaaggggcagtctccctatggcaagctgtatctagtggcaacgccgattggcaatctagatgatatgacctttcgtgctatccagaccttaaaagaagtagattggattgcagctgaggacacgcgcaatacagggcttttgctcaagcattttgatatttccaccaagcagattagttttcatgagcacaatgccaaggaaaagattcctgatttgattggtttcctgaaagcaggacaaagtattgctcaggtatccgatgcgggtctgcctagtatctcggaccctggtcatgatttggtcaaggcagccattgaggaagaaattgcggttgtgactgttccaggtgcctctgcaggaatttctgccttgattgccagtggtttagcgccacagccacatatcttttacggctttttaccgagaaaatcaggccagcaaaagcaatttttcgacttgaaaaaagactatcctgaaactcagattttctatgaatcgccccatcgtgtggcagatacgttggaaaatatgctagcagtttatggtgaccgctcggtggtcttggttagagaattgaccaaaatctatgaagaataccaacgcggtatcatttctgagttattagaaagcatctctgaaacgcctctcaagggtgaatgtcttctcatcgttggaggtgccagtcaggatgtggagaaaaaagacgaggaagacttgttctcagaaatccaagctcgcatccagcaaggcatgaagaaaaaccaagctattaaggaagtagctaagttttaccagtggaataagagccagctttacgcagcctaccatgactgggaagaaaatcaagaaaatgactaaacagggaagtttgccttcttccctttttttgttatactagtagaagaaaaaattagaaagatttgtgggagtgaaaaagtcctgtggactttttcagcctgagccaagaaacttgaaagcgaagtaagtcctgtggactttttcagcctgagccaagaaattcgaaagctaggcaagttcggttggctttttcaatgtgaaacttgtcttcacactcccaaagaggtattagtgtcgtgtctcaatcttatatcaatgttatcggtgctggtttggcaggttctgaagctgcctaccaaattgcagagcgtggtattccagttaaactttatgaaatgcgtggtgtcaagtcaacaccccagcacaaaacagacaattttgcagagttggtttgttccaattctcttcgtggggatgctttgacaaatgcagttggtcttctcaaggaagaaatgcgtcgcttgggttctgttattttggaatctgctgaggctacacgtgttcctgcaggtggtgcgcttgcggtggaccgtgatggtttctcccaaatggtgacagaaaaagttaccaaccatcccttgattgaagtggttcgtgatgaaattacagaattaccgacagatgttatcacagttgtcgctactggtcccttgaccagcgatgccctagctgagaagattcatgctcttaatgatggcgatggtttctatttctacgatgcggcagcgcctattatcgatgtcaatactatcgatatgagcaaggtctatctcaagtctcgttatgataagggagaagccgcttatctcaacgctcctatgaccaagcaagagtttatggatttccatgaagccttgatcaatgcggaggaagcaccactcaattcttttgaaaaagaaaaatactttgaaggatgtatgcctatcgaagtcatggccaaacgtggcattaaaactatgctttatggtcctatgaaaccagtgggtctggagtatccagatgactacacaggacctcgtgatggagaattcaaaacaccgtatgcggtggttcagcttcgtcaggacaatgcggctggtagcctttacaatattgttggtttccagacccacctcaaatggggagaacaaaagcgtgtcttccaaatgattccaggtcttgaaaatgcggagtttgtacgttatggtgtcatgcaccgcaattcttacatggattcaccaaatcttcttgagcagacctatcgttccaagaaacagccaaacctcttctttgctggtcagatgacaggtgtggaaggctatgttgagtcagctgcttcaggcttggttgcgggaattaacgccgctcgtctcttcaagggagaaagcgaggctgttttcccagagaccacagcgattggaagtctggctcattatatcacccatgctgacagcaaacatttccaaccaatgaatgtcaactttgggattatcaaggagttggaaggcgagcgtattcgtgataagaaggctcgttatgaaaaaattgcagagcgcgctcttagcgacctagaagaatttttaactgtctaatttttttgaaagaattgctcatgatactataaaaatcttagaaattgtgataaaataggtaggataaaagaaggagagtgaaaatggcgaatcccaagtataaacgtattttaatcaagttatcaggtgaagcccttgccggtgaacgaggcgtagggattgatatccaaacagttcaaacaatcgcaaaagagattcaagaagttcatagcttaggtatcgaaattgcccttgttattggtggaggaaatctctggcgtggcgaacctgctgcagaagcaggaatggaccgcgttcaggcagattacacaggaatgcttgggactgttatgaatgctcttgtgatggcagattcattgcaacaagttggggttgatacacgtgtgcaaacagctattgctatgcaacaagtggcagagccttatgtccgtggccgtgcccttcgtcaccttgaaaaaggccgtatcgttatctttggtgccggaattggttcaccttacttctcaaccgatacaacagcggcccttcgtgcagctgaaatcgaagcagatgccatccttatggctaaaaatggtgtcgacggtgtttacaatgccgatcctaagaaggacaagacagctgttaaatttgaagaattgacccaccgtgacgttatcaataaaggtctccgtatcatggactcaacagcttcaaccctctcaatggacaacgatattgacttggttgtctttaacatgaaccaaccaggcaacatcaaacgtgtcgtatttggtgaaaatatcggaacaacagtttcaaataatatcgaagaaaaggaataagaaagattatggctaacgcaattattgaaaaagctaaagagagaatgacccagtctcaccaatcacttgctcgtgaatttggtggtatccgtgctggccgtgccaatgcaagcttgcttgaccgtgtacatgtagaatactatggagtcgaaactcctcttaaccaaatcgcttcaattaccattccagaagcgcgtgttttgttggtaacaccatttgacaagtcttcattgaaagacatcgaacgtgctttgaacgcttctgatcttggtatcacaccagcgaatgacggttctgtgattcgcttggttatcccagctcttacagaagaaactcgtcgtgaccttgctaaagaagtgaagaaggtcggtgagaatgctaaggtggctgtccgcaatatccgtcgcgatgctatggacgaagctaagaaacaagaaaaagcaaaagaaatcactgaagacgaattgaagactcttgaaaaagacattcaaaaagtaacagacgatgctgttaaacacatcgacgacatgactgccaacaaagagaaagaacttttggaagtctaaaaataaacagaaaaactcagttggcattgctggctgagttttattcgaaagaaggaaatatgaatacaaatcttgcaagttttatcgttggactgatcatcgatgaaaacgaccgtttttactttgtgcaaaaggatggtcaaacctatgctcttgctaaggaagaaggtcaacatacggtaggggatacggtcaaaggttttgcctacacggatatgaagcaaaaactccgcctgaccactctagaagtgaccgccactcaggaccaatttggttggggaactgtaacggaagttcgtaaagacttgggtgtctttgtggatacaggccttcctgacaaggaaatcgttgtgtcactcgatattctccctgagctcaaggaactctggcctaagaagggcgaccaactttacatccgtctcgaagtggacaagaaagaccgtatctggggactcttggcttatcaagaagacttcaaacgtctggctcgtcctgcctacaacaacatgcagaaccaaaactggccagccattgtttaccgcctcaagctgtcagggacttttgtttacctgccagaaaataacatgcttggctttatccatcctagcgagcgctacgcagagccacgtttgggtcaagttttagatgcgcgtgttattggtttccgtgaagtggaccgtactttgaacctatcccttaaaccacgttcctttgagatgttggaaaatgatgcccagatgattttgacctacttggaaagcaatggtggtttcatgaccttgaatgacaagtcatcccctgaggatatcaaggcaacctttggaatttctaaaggtcagttcaagaaagcactcggtggcttgatgaaggctggtaaaatcaagcaagaccagtttgggacagagttgatttagggagacatatgagaaaatcattttacacttggctcatgaccgagcgcaatcctaaaagtaacagtcccaaagctatcttggcagacctagcttttgaagagtcagcctttccaaaacacacagatgattttgatgaggtgagtcgctttttggaggagcatgccagtttctcttttaacctaggagactttgacgctatctggcaagaatacatagagcactagcatgattcactgggtttgggctagtaatttctccacccctttgctataataaaaagaaataaaaggattagagaggttctttatttgaaggaacattcaatagacattcaactgagtcatccagatgacctgtttcatctttttggttccaatgaacgccatcttcgtttgatggaagaagagcttgatgtggtgattcatgctcgtacggagattgtccaggttttgggagaagaggctgcttgtgaggaagcccgtcaggttattcaagctctcatggtcttggtgaaccgtgggatgaccgttggtacgccagatgtggtgactgcaattagcatggtcaaaaacgatgaaatcgacaagtttgtcgccctttacgaagaagaaatcatcaaggataatacagggaaacctatccgtgtcaaaacactgggtcaaaaactttatgtggacagtgttaaacagcatgatgtgacctttggaattgggccagcaggaacagggaagacctttcttgcagtgaccttggcagtgactgctcttaaacgtgggcaggtcaagcggattatcttgactcgtccagcagtggaagcaggagagagtctaggttttcttccgggtgatcttaaggagaaggtagatccttaccttcgacctgtttatgatgccttgtatcagattctgggaaaagaccaaacgactcgtctcatggagcgtgaaattatcgagattgcgccccttgcctacatgcgtggacggaccttggatgatgcctttgtcattctcgatgaggcacaaaatacgaccatcatgcagatgaagatgttcttgacgcgtttaggctttaattctaagatgattgtcaatggagatatcagtcagattgaccttccgcgtaacgtcaagtccggtttgattgatgcccaagaaaagctcaagaacattcaccagattgactttgttcatttttcagccaaggatgtggttcgccatccagttgtcgctcagattatccgagcttatgaaccagctccagttaaaaatgaagagcgtgaagaagtccaagaagaaacagaataacaaaaaagagcagttcaggtggacttgctctttcttttatctgataattatattttttagactagttcatcaattggagtatgttttttatcgagaccttgggctactggaagactggttaagtaaccttgataagtggtcacaccttgacgcaagcccttatcttcagagattgcttgtataaaacctttaccagccaaagcttcgatataaggaagagtgacattggttagggcgatggttgaagtacgggcaactgcaccagggatgttggcaacggcatagtggagaacgccgtatttttcatagacaggttcatcgtgcgttgtgacacggtcagctgtctcgataatgcccccttggtcaacggcgacgtccacaatgacagagcctggacgcatttgcttgaccatctcatctgtcaccaattttggtactttggcacctgggatgagaaccgctccgatcaccacatccgcatctctcacactggcttcgatgttgagcgaattggacataagggtttgaatttgatgaccaaagacctcctctaaaacggagagacgtttagcactgatatcaaggatggtcacttgcgctcccaatcctaaagcgatgcgggcagcatgggtccctacgacaccaccaccgatgatggttacttttcctttaggtacacccggtacaccacccagtaggacgccagaacctcctgcttgtttggttaggaagtgagctccgatttggactgccatacggcctgcaacctcactcataggaacgaggagtggtaactggccttgggaatcatggacagtttcataggcaatccctgttgtttttgctgctagcatagcatctgctaattcaggagcagcggccatgtgcaagtaggtgaagagaagcaggtcgtcacgcaagtactcatattcagaaggtaatggttcttttactttcacgactaactttgcagcccaagcttcaccagcactagcgacaatttcagctccttgcttttgatagtcagcatcagtaaagcctgaaccgagaccagcatttgtttcgataaggacgcgatgaccacgaccgactaagctgaggacaccagcaggtgtgagggcaacacggttttcattattcttaatttcttttggaattccgattaacatagagaaaaactccctttctattgacgggttgtaaatgatttatcacattatctataaaaataaggtgatgattttattctatatgaaaccgctttaaaaagcaaggaaaacttgttgtaacttcttttttatgctagactgatagaaaatacttttgaatggtagaaacgtatggaatcaatctttttaaaactagctcagtatccaatagtcgagactgagcgtttattgcttagacctgtaaccttggatgatgcagaagaaatgtttgactatgcctcggataaggataatacacgttacacttttctaaccaatcaaaatttagaagaaaccaaaaataatattgctcagttctacttggctaatcccttgggacgttggggaatagaactaaaaagcaatggcaaatttatcggaacaattgatttgcacaagattgatcctgctcttaagaaggcggctattggctacattatcaataaaaagtattggaatcaaggattaacgacagaagccaatcgtgccgtgattgagctggcttttgagaagattggaatgaacaagttgaccgcccttcacgataaggataatcccgcatctggcaaggtcatggagaaatcaggcatgcgcttttcccatgaagaaccatatgcttgtatggaccagcatgaagaaggccgaatcgttacaagagttcattatgtcttgaccaaggaagactattttacatataaataagcagttgagaagaaattttcaactgttttttcttcctcttacgaataatctaagagaggagaaaatatggaagcaattatcgagaaaatcaaagagtataaaatcattgttatctgtactggtctgggattacttgtcggaggatttttcctgctaaagccagctccacaaacacctgtcaaggaaacgaatttgcaggcagaagttgtagcagtttccaaggattcggtatccgaaaaggaagtaaagaaggaagaaaaggaagaaccccttgaacaagatctaatcacagtagatgtcaaaggtgctgttaaatcgccagggatttatgatttgcctgtaggtagtcgagtcaatgatgctgttcagaaggctggtggcttgacagaacaagcagatagcaagtcgctcaatctagctcagaaagttagtgacgaggctctggtttacgtcccaactaagggagaagaagcagctagtcagcaggcaggtcctgggacggcttcctcaacgagcaaggaaaagaaggtcaatctcaataaggccagtctggaagaactcaagcaggtcaaaggactgggtggcaaacgagctcaggatattatcgaccatcgtgaggcaaatgggaaattcaagtcggttgatgaactcaagaaagtctctggcattggtgccaagaccatagaaaagttaaaagattatgttacagtggattaagaatttctctattcccctaatttaccttagttttctgttgctttggctttactacgccattttctcatcatcttatctcgcactactaggttttgtttttctgctagtctgtctctttatccaatttccgtggaaatctgctggtaaagttctaataatttgtggaatctttggtttctggtttctgtttcaaaattggcaacagagtcaagcgagtcaaaatttggcggattctgttgaaagggtacggattttaccagacactgttaaggtcaatggtgatagtctatcctttcgtggtaagtctgatggacgcatttttcaagtctattataaactccagtccgaggaggagaaagaagcctttcaagctttaaccgaccttcatgagataggactagaaggaaaactttcagaaccagacgggcagagaaattttggtggttttgactaccaagcctatctgaaaactcaagggatttaccaaacattaactatcaaaagaatccagtcacttcaaaaggttagcagttgggatataggagaaaatctgtccagtttacgtcgaaagactgtggtttggattaagacgcattttccagaccctatgcgcaattacatgacagggctcttgttaggacatctggacaccgactttgaggagatgaacgggctttattctagtttaggaattatccacctctttgccttgtcgggtatgcaggtaggttttttcatggacggatttaagaaactcctcttgcgattgggcttgactcaagaaaagttgaaatggctgacttatcccttttcccttatctatgcagggctgacaggattttcagcatcagttattcgcagtcttttgcaaaagttactggcacaacatggtgttaagggcttggataattttgccttgacggtccttgtcctctttatcgtcatgcccaactttttcttgacagcaggaggagtcttgtcctgcgcttatgcttttatcttgaccatgaccagcaaagaaggagaaggcctcaaggctgttgctagagaaagtctagtcatttccttgggaatattacccatcctatccttctattttgcagaatttcagccttggtctatccttttgacctttgtcttttcctttctttttgacttggtcttcttaccgctcttgtctatcttatttgccctttcctttcttcatccagtcattcagctgaattttatttttgaatggttggagggaatgattcgctttgtatcacaggtggcaagtagacctctggtctttggacaacccaatgcatggattttaatcttattgttaatttccttggctttggtctatgatttgaggaaaaacattaaaaggctagcagtgttgagcttattgattacaggtctctttttcttgaccaagcatccactggaaaatgaaatcaccatgctggatgttgggcaaggggaaagtattttcctacgggatgtaactggtaaaatcattctcatagatgtgggtggcaaggcagagtctagtaagaaaatagaaaaatggcaagaaaagacgacgaccagtaatgcccagcgaaccttgataccctatctcaaaagtcgcggagtatccaagattgaccagctaattttgaccaatacggacaaggaatatgttggagatttgttggaggtgaccaaggcttttcatgtaggcgaaattttagtgtcaaaaggcagtttgaaacagaagcaatttgtggcagaactacaagcgacccaaacaaaagttagaagtataacagcaggagagaacttgtcaatttttggaagtcagttagaagtcctatctccaaggaaaattggagatggaggttatgaagattccctggttctgtatggaaaacttttggataagtactttctcttcacaggaaatttggaggaaaaaggagagaaggaattgctgaagcactatccagacttgaaagtggatgttttaaaagctggccaacatggctctaaaaaatcatcaagttcagactttctagaaaaactcaaaccagagtttactcttatctcagttggaaagaacaatcgagcgaaactcccccatcaggaaactttgacacgactggaaactatcaatagtaaagtttaccgaactgaccagcatggagctatacgctttaaagggtggaatagttggaaagtcgaaacggttggttaatgagcagaaacttttcaaaaaaataactttttatcttgacaagagctagaaaacttggtatcatgtaaaagttgagaaaagcagaagtgagagcttctcgccttgtgacatgaagttgcctggccctacggatgaaaagtttctaagaaacgctatcataacgtgcgggcttgtatatttacgagtccgctattgtttttctctaataaaacaaaagaggtgaaaaccatagcaaagcaagacttattcatcaatgatgagattcgtgtacgtgaagttcgcttgattggtcttgaaggagaacagctaggcatcaagccactcagtgaagcgcaagctttggctgataacgctaatgttgacctagtattgattcaaccccaagccaaaccgcctgttgcaaaaattatggactacggtaagttcaagtttgagtaccagaagaagcaaaaagaacaacgtaaaaaacaaagtgttgttactgtgaaagaagttcgtctaagtccaactattgacaagggtgactttgatacaaaacttcgcaatgcacgcaaattccttgaaaaaggaaataaagttaaggtatctattcgctttaagggtcgtatgattacccataaagagattggtgcaaaagttttagccgagtttgctgaagcaactcaagatattgccatcatcgaacaacgtgctaaaatggatggacgtcaaatgttcatgcaattggcgccagcgactgacaaaaaataattgtcagaaagttaaataaaggagaaaaaatcatgccaaaacaaaaaacacaccgcgcatcagctaaacgtttcaaacgtacaggttctggtggacttaaacgtttccgtgcttacacttctcaccgtttccacggaaaaactaagaaacaacgtcgtcatcttcgtaaagcatctatggtgcattcaggagattacaaacgtatcaaagcaatgcttactcgcttgaaataatagcttgactgtaagtaaacaattctaggaaatatttggaggaaataaaacatggcacgtgttaaaggtggcgttgtatcacgcaaacgtcgtaaacgtattcttaaattagcaaaaggttactatggagctaaacacatcttgttccgtactgcaaaagaacaagtaatgaactcttactactatgcataccgtgaccgtcgtcagaaaaaacgtgacttccgcaaattgtggatcactcgtatcaatgcggcagctcgtatgaacggactttcatactcacaattgatgcatggtttgaaattggctgagatcgaagttaaccgtaaaatgcttgctgacttggctgttaacgatgcagcagctttcacagctcttgcagatgcagctaaagcaaaacttggtaaataataattgattgtttcattttgccttatgcggtgtatgccgtaaaaggcaggatgaaacttttttattttccataaatgattttctattttagagagtaaatcacagattttttcaaagaaaataggatatttcttgtataataggaatatctaaaaagatttggagttagaagaagatgatagtaggtattgatttaggaacgactaattctttagtaggagtataccaagatggccaggtcaagctgcttcccaatgcttttggtgaatatttgactccttctgttgtggctttagatgacaatgatgaaatcatagttggaaaaattgccaaggaacgcttggtgacacatcctgacagaactctttctcagttcaaacgatttatggggaccaaacatgaattggtcctaggaaatagaacctataaagcggaggaactaagttcttttgtcattcgaaaattagtggatgatgcagagagtttccttggtgagaaagttgaggaagtcattgtcagtgtaccagcttattttaacgatgcacaacgctatgctacaaaattggcagggcaatttgcaggggttaaaatagagcgtatcatcaatgaaccttccgcagctgctctcgcaaaaaaatctatgagcaatcaagaagaccaatcttttgtggttgtcgattttggtgggggtacgctagatatctcggttgttgagttgtttgataacgttgtagagattgtgtctatcgcaggtgataatcgattgggaggagaggattttactgcagcaattgctgaggaatttttaacctcaaatcacttgtctaggaaatctatttcacgagagttttacagcaagatattggttcaagcggagaaggcaaagttgaatctgaatatcaatgaagaagtgcagatgctagtaatggatcaggaaaaggagtactctttagacctaacttatcagagattttatgagctttgtcagcctttgcttgcccgacttaagtctgtattagatagagccttgagggatgcccgatatagttatgtgtcctctgaaaattttgtccttgtcggcggtacctcaaaacttcgtttagttcaagactttctatcttactgtattgaccaagcggttcaattaactgatgatcctgataaaatgattgcaaaaggttgtgctcttctagcgggaataaaggggcgtcagggagaagttcgagacttattgttatcagatatttgtccttttacgcttggaacttcagtagtgggtgatcgtttttctccgattatcgaacgtaattctcctttacctacttcaaaaaaggaacattattacactgcagaactgggacaaagtcaagtgagagtagaagtctatcaaggagaaatgatgaaggcttcacaaaacttatttctaggagaattggaagttcctgtgcctgtaaaccatgaagttaacgaaggtctcactatacgattcacctacgacttaaatgggattttagatgtggaagtaaccatcgactcaacacaggaagtctttaaccatgttattcttcaagagagtatcactctgactgaagaggaaatcaaagaaaaacaagccgagctgactcgctataagattaatgcccaggaaactgaggtttaccgtttcttgattgaaaaagccaatcgtgtgtatagcatgctattagggagaagaagagatgagttgatggcagaaactagacgctttgaagaagaagtcaaacaagcatctatgtatcatttaccaaaactttatcaatcattttctaactatctagaatttctagaacgaggtctatgagaggggattgtatgagcaagtgggaaatcttaggaattgagccaactcatgacgttaagcttattagaagacgttatgcagagctggttcgactctatcacccagaggaccaaccagaaatctaccaacaaattgtggaagcctaccagtctgctttgagagaagcacggtctaaaaagaccaggcaagaaagtggtagaagtgaagctagctccactcagcagatcaatgagcaagaaaacagaacgacaaactctgctaccaattcacttgattttgaattatttaagtctgaggagaaaactgagcaagtagatactgcacaaccttctcttgacttcggtgatgttcatgagactgctgcttcaaatgaaagttacaatgaaccagtcgctcctcgactaaattttgaaacggtcaatgaagatacaagttctcaagaggtagctgcatctagaaatgtcttagatttcagtgattatctagagttagagtatttgattcgaaatgcgattgaaagtattgtagggaatcctgactataccatagaagaacaagaacatctttggaaacagttttttagtcaatatggatatgatatgagcactgttcagtctgttttagaagaaatggatgtttatatttttaacaaacctgagcaattctctatcatcattcccttactggaagactatgtaccagactttaagtgctggggttattactataaactgaagcattggaaggttaaaagggctactgcctacaaaaatggagagtcccttgaagatgcaaaaaaagaaatttcgaatttgtatgcttcttatcgtttatgtcaagcaatcctcgaagattcccaaaaagtcaatcaaattggggtttggataaaattttttaaacaatctttttctcctagtacggttctttttctgttgaataacagtaaacaaatgattacttgcattccagtattggcttatattcttgatatgataggtcaagtaaagactaatgaggaccaaaaagcctatgatgaacttctagcttactttgaggaattacaagcagattcagaagaaccattcgatatccattcttataatttgctaaatctttcagaggttgaggaagccctatatctcttagtctatacgccatatcaagacgaggctagacttgtagaatcttggaaacaccttctagaaaagactcaggataaatctctcttacttcaattattagaggaaattgatgtttatccatttacaaataagaaggttttgaatcttgtttttcgatttgtagaaaataacatcaaggatggagaaaatccttatctaaagaaattcaatttttggaatgatatttattactatccttgggctatcaagaaatatgagttaaataaaaaagagaaatttgattactggtattatgagggatatctatttgtcgataaattgttaaaagatgataaacttgtcaatgattggacgatttggaaacaagtttttaaagagaaacctcgcatttatcctatcttttttgaacaagtttataaggagtatcaccgttttacagatggagaactattgaagtttatattgggtcaatttcatacttctagcatggctccgctcttgatgacagaggagacagacctgaaactcgaagagatgactcaccacgcatatcaactcaatcatccgaatcctaaagtatcttatcttgcttggattaaaagagatgttcttaaaaataggctcttaacttttacctttgcgactttaaccattatcagttttcttctaagcgtctatgacgaacctggtttaaatagatggctatacataggaatggtttctctctataattattacatgcataggagacttgaccaaccaatcaaagaaggactcaatgcccgagggcaaaaaataaaattttattataatagaaatctttgggttttagcagtaatactgctttcctttgttccagttattccacttggactcatctcttgtctattatttataagcattttttctattattgatggtttccatgttcgttatgggttgagagtgacctattctttgaacaagttaattcctctcggactgtttttatctgctggttttctagttgctctggcaaaccgaagtgaaaagatttcatatattgtaatttgttacatctttatttctatgatagttgttggtattctatactttacaagattttggataggatttccaccctcactgaaggaaattatttttccgattataatgggtgttatattctttcaattattacctctaattcacagtcgcttaagtctatttaatccagttattctaagaaatgaaactttgagcttaacttttttacttttattaaatggaatcgtattggcttattttacaaaagagcagcgtttagcaattggtgttaagaagacctttatgatttatggattgcagatttttattttcctaagacggttatttagaattctattcatccctataccagattttagcaaaatcttttttgaaaaagacctgttaatattgaacaatgagtttactttctacttccttgaggggctttttatccttatcatgctttttcttattcgcaatatacgcaaagaaaatcgtaaaagtgctgcttagaataaaatagtagagaagaggactctagttcaagtttctagtaaattttcctgaataaaggtataatagaactattaaaatgaaagaggtaatgaatatggcttcaaaaatgctacacacttgcttgcgagtagaaaatctcgaaaaatcaattgcattttatcaagatgcttttggatttaaagaattgcgtcgcagagattttccagaccatgccttcacgattgtctatctaggtcttgagggtgatgactatgagttggagttgacttataactacgatcatggtccttatgtggttggagatggatttgcccatatcgccctcagtacacccgatcttgaagctcttcatcaagagcacagtgcaaaaggctatgaagtgactgagccaaatggtctaccaggaactgcacctaactattactttgtcaaagaccctgatggctacaaggtcgaagtcattcgtgaaaaataatttcttgaagtcaagtagaatgttcgttttttacttgactttttttagctgaaagagtataatagtaaaaatttaacctttaaggggagtccagagagactcacaaggtgtcagataaaagaatagtacaattttctagaggagactttttaagtgtgctctcttgtgttgtacgattttaactgaggccttgcactagcaaggtcttttctttatctggtccccttaaaatttaaggaggaaaagtcatgaatcccacatgtaagaaacgtttgggtgcaattcgtttggaaaccatgaaggtggtagcacaggaggaaatcgcgccagcaatctttgaattagtcctagaaggggaaatggttgaagccatgcgagcaggccaatttcttcatctgcgtgtgcctgatgatgcccatcttttgcgccgtcctatttcgatttcatctattgataaggttaagaagcagtgtcatctcatttatcggattgaaggggctgggacagctattttctcaaccttaagtcagggggatactcttgatgtaatgggccctcagggaaatggttttgatttgtctgatctagatgagcagagccagattctccttgttggaggggggattggcgtaccgcccttgcttgaggtagccaaggaattgcatgcgcgtggtgtgaaagtagtgacagttctcggttttgccactaaggatgctgttattttagagacggaattagctcaatatggtcaagtttttgtaacgacagatgatggttcttatggtatcaagggaaatgtttccgttgttatcaaggatttagacaatcaatttgatgctgtttactcatgtggggctccaggaatgatgaagtatatcaatcaaaccttttatgaccacccaagagcctatttatctctggaatctcgtatggcttgtgggatgggggcttgctatgcctgcgtcctaaaagtgccagaaagcgagacggtcagccaacgcgtctgtgaagatggccctgttttccgcacaggaacagttgtattataaggagaaaattatgactacaaatcgtttacaagtttctctaccaggcttggatttgaaaaatccgattattccagcatcaggctgttttggttttggtcaagagtatgccaagtactatgatttagaccttttgggttctattatgatcaaggcgacaacacttgaagcccgttttggcaatccaactccaagggtggcagaaacacccgctggtatgcttaatgcaatcggtttgcaaaatcctggtttggaagttgttttggctgaaaagttaccttggctagaaagagagtatccaaatcttcctattatcgccaatgtagctggtttttcaaaacaagagtatgctgctgtttctcatggtatttccaaggcagctaatgtgaaggctattgagctcaatatttcttgtcccaacgtagatcactgtaatcatggactcttgattggtcaaaaccctgatctggcttatgatgtggtgaaagcagctgtggaagcttctgatgtgccagtttatgtcaaattaacccctagtgtgaccgatatcgttactgtcgcaaaagctgcagaagatgcgggggcaagtggcttaaccatgatcaatactctggttggtatgcgctttgacctcaaaacaagaaaaccaatcttggccaatggaacaggtggaatgtctggtccagcagtctttccagtagccctcaaactcatccgccaagtcgcccaaacaacagacctgcctatcattggaatggggggagtggattcggcagaagctgccctagaaatgtatctggctggagcatctgctattggagttggaacagccaactttaccaatccatatgcctgtcctgatatcatcgaaaatcttccaaaagccatggacaaatacggcattagcagtctggaagatctacgcaaggaagtaaaagagtctctgaggtaaactgcaatcaatctgttcttgattttttatcagtttgtaatgttgattatagagaattttgatacaataaaatggaaagaacagaggaagaaagtttatgaagaaattgagatttgtttttttagctctgctatttttcttagccagaccagagagtgcaatggctagtgatggtacttggcaaggaaaacaatacctgaaagcagatggtagtcaagcagccaatgagtgggtttttgatactcattatcaatcttggttttatatcaaagcagatgctaactatgctgaaaatgaatggttgaaacaaggtgacgactatttttacctcaaatctggtggctatatggcaaaatcagaatgggtagaagacaagggagtcctctattatcttgaccaagatggaaagatgaaaagaaatgcttggctaggagcttcctatgtcggtgctacaggtgccaaggtaatagaagactgggtctatgattctcaatatgatgcttggttttatatcaaagcagatggccagcacgcagagaaagaatggctccaaattaagggcaaggactattatttcaaatccggaggttatttactgacaagtcagtggattgaacaggcttatgtgagtgctagtggtgctaaagtacagcaaggttggctttttgacaaacaataccaatcttggttttacattaaagaaaatgggaatcatgctgataaagaatggatttttgataatggtcactattattatctaaaatccggaggctatatggcagccaatgaatggattttggataaagaatcatggttttacctaaaatctgatggcaaaatggctgaaaaagaatgggtctatgattctcatagtcaagcctggtactacttcaaatctgctggctacatggcaaaaaatgagactattgatggtcatcagctaggaaacgatggaaaatggcataaggagtccaagactagctctgattattatcaggtccttccagtgactgcaaatgtttatgatgcagatggtgaaaagctctcctatatatcgcaaggtagtgtcgtctggctagataaggatagaaaaagtgatgataagcatctggctattactgtttctggtttgtcaggctatatgaaaacagaagatttacaagcattagatgctagtaaggattttatcccattttatgagagtgatggccaccgtttttatcactatgtggctcagaatgctagtatcccagtagcttctcatctttctgatatggaagtaggcaagaaatattattcggcagatggcctgcattttgatggttttaagcttgagaatcccttccttttcaaagatttaacagaggctacaaactatagtgctgaagacttggataaggtatttagtttgctaaatattaataatagtctcttagaaaataagggagctacttttaaggaagccgaagaacattatcatatcaatgccctttacctccttgcccatagtgctttagaaagtgattggggacgaagtaagattgccaaagataagaataatttctttggaattacagcctatgatacgaccccttacctttctgccaagacatttgatgatgtggataagggaattttaggtgcaagcaagtggattaaggaaaattatatcgataggggcagaactttccttggaaacaaggcatctggtatgaatgtggaatatgcctcagatccttattggggtgaaaaaattgctagtgtgatgatgaaaatcaatgagaagctaggtggcaaagattagtcctataattgatactcttcgaaaatctcttcaaaccacgtcagcgtctccttgggtgatgtatgtgattgactttgtcagtcttatctacaacctcaaagcagtgctttgagcaacctgcggctagcttcctagtttgctctttgattttcattgagtatgaatatgatttgagtgagtataagttaaaaatcctgatttcaagtaaaatcaggattttttcatggatgcaattttttctgggtctggtgtgacacggagggtcttttgtcctgtgtaagtgacaaagcctggttttccaccagttggtttattgagtttcttgacttcaatcatatctacctgcaccagatttgacaggcgtccttgagagaagtaggcggccagctctgctgcgtctgtcttgacttcatcagatgggtcaagattgcctgagatgacaacatggcttccaggaatgtccttggcatggaaccaaagttcctccttgcgggccattttaaaggttagctcctcattttgcaggttattgcgaccgacatagatgatggttttgccatcgcttgctagatattgttctggttttttgcgtttctggattttctcccgttgtcttctgcggataaaacctgtttggatcaattcttcacggatttcagcgatttcttctagtccagcttggttgaggacggtttctacactttccagatagagaatggttgccttggtttcctcaatcagctcagtcaagtatttgacagcttctttgagtttctgataccgtttaaaatagcgttgggcattctggttgggagtcaaggccttatcaagcgcaattgtgataggttgattagtatagtagttgtctaggataacctgatcttggtcattaggaacttgatggaggaaggttgtcagtaattcccccttttgacgaaattcttcagcgttgtctgtcgccagtaactctttttcttgttttttaagcttatgacgatttttttgaagttcattttcaacacgacgaatgagttcactggcttgctgttttacgcggtcgcgctcagccttatccttatagtaggtgtccaacaaatcagaaagactggcaaaaggctctcccacctgatttgcaaaaggaactgggctgaaggaagtctcagtcaagcatggcttggtttcttgattgaaaaagtttcggaaagtggaaagtttttcactaaccagtatcctttccaattcatttgccgtatcgcgtcccagaccttgaaagaggctttgaagatttttagctgtcgtttcctgtgtttgcaggatttcaaaaagtttctcgtccttgattgtaaaaggattgagagcttccgtacttggcggagcgatataggtcgatccaggaagcaaggtgcggtagctattttgtgaaaagccaacatgtttgataacttcgaggattttatgactgcttttatcgaccagtagaatattactgtgtttccccataatttcgataatcaaggtagcctgaatatggtccccaatctcgtttttattagaaaccgtaatttccacaatacggtcattttccacttgctcaatcgactcaatcagggcaccctgcaaatattttcttaaaaccatgataaaggtagaaggctgggctgggttttcaaaagttgtttgggtcagctgaatgcgtccaaaaactggatgggcagaaaggagcaggcgatgactttggcgattgctacggatttgcaagaccaactcttgttcaaaaggttgattgattttctgaatgcgaccattcactaattctcttcgcaattcctcaaccatgtggtgtaaaaaaaatccgtcaaatgacatcgttctctccttgtgattgtattccatagtattatatcaaaaaggtagaataaaatcatggaaatgtggtataataaagccaagtaaagagaaacgagaagcacatgtatattgaaatggtagatgaaactggtcaagtttcaaaagaaatgttgcaacaaacccaagagattttggaatttgcagcccaaaaattaggaaaagaagacaaggagatggcagttacctttgtgaccaatgagcgtagtcatgaactcaatctggagtaccgtgacaccgaccgtccgacagatgtcatcagccttgaatataaaccagagttggaaattgcctttgacgaagaagatttgcttgaaaatccagaattagcagagatgatgtctgagtttgatgcctatattggggaattgttcatctctattgataaggctcatgagcaggctgaggaatatggccacagctttgagcgtgagatgggcttcttggcagtacacggctttttacatattaacggctatgatcactacactccggaagaagaagcggagatgttcggtttacaagaagaaattttgacagcctatggactcacaagacaataaacgaaaatggaaaaatcgtgacctgatatccagtttagaatttgctcttacaggaatttttactgccataaaggaagaacgcaatatgcgaaaacatgcggtgacggctctcgtggtcatcctcgcaggttttgtttttcaggtgtcacgaatcgaatggctctttctcctattgagcatttttttggtagtagcctttgaaattatcaattctgctatcgagaatgtggtggatttggccagtcactatcacttttctatgctggctaaaaatgccaaggatatggcggctggcgcggtattagtggtctctcttttcgcagccttaacaggcgcattgatttttctcccacgaatctgggacttaatattttaaacagtaagaggaaattatgacttttaaatcaggctttgtagccattttaggacgtcccaatgttgggaagtcaacctttttaaatcacgtcatggggcaaaagattgccatcatgagtgacaaggcgcagacaacgcgcaacaaaatcatgggaatttacacgaccgataaggagcaaatcgtctttatcgacacgccagggattcacaagcctaaaacggcccttggagatttcatggttgagtctgcctacagcacccttcgtgaagtggacaccgttcttttcatggtgcccgctgatgaagcgcgtggtaagggagacgacatgattatcgagcgtctcaaggctgccaagattcctgtgattctagtggtaaacaagattgataaggtccatccagaccagcttttgtctcagattgatgatttccgaaatcagatggacttcaaagaaatcgttccaatctcagcccttcagggaaataacgtgtctcgtctagtggatattttgagtgaaaatctggacgaaggtttccagtatttcccgtctgatcaaatcacagaccatccagaacgtttcttggtttcagagatggttcgtgagaaagtcttgcacctaactcgtgaagagattcctcactcagttgctgtagtagttgattctatgaaacgagacgaagagacagataaggttcacatccgtgcaactatcatggtggagcgcgatagtcagaaagggattatcatcggtaaaggtggcgctatgcttaagaaaatcggtagcatggctcgtcgtgatatcgaactcatgctaggagacaaggtcttcctagaaacatgggtcaaggtcaagaaaaactggcgcgataaaaaactagatttggctgactttggctataatgaaaaagaatactaagtagaggtgggctcatgcctgcttcttgtttttacagaaggaggacttatgcctgaattacctgaggttgaaaccgttcgtcgtggtttagaaaaattgattctgggaaagaagatttcgagtatagaaattcgctatcccaagatgattaagacgaatttggacgagtttcaaaaggaagtgcctggtcagattgttgagtccatgggacgtcgtggaaaatatttgcttttctgcctgacagacaaggtcttgatttcccatttgcgcatggaaggcaagtatttttactatccagaccaggttcctgaacgtaagcatgcccatgttttcttccagtttgaagacggtggcacgcttgtttatgaggatgtacgcaagtttgggactatggaactgtttgcaccagaccttttggaagcctactttatttctaaaaaattagggcctgaaccaagcgaacaagaatttgatttgcaggtctttcaagctgccctagccaagtccaaaaagcctatcaaatctcacttattagaccaaaccttggttgctggccttggcaatatttatgtggatgaagtcctctggcgagctcaggttcatccagctagaccttcccagactttgacgacagaagaagcgtcagccattcatgaccagaccatttctgttttgggccaggctgttgaaaaaggtggctcgactattcggacctataccaatgcctttggggaagatggaaccatgcaggattttcatcaggtctatgacaaggctggtcaagagtgtgcacgctgtgggactgtgattgagaaaatgcaactaggcggacgaggcacccacttttgtccaaactgtcaaaggagggactgatgggaaaaatcattggaattacaggaggaattgcctctggtaagtcaactgtgacaaattttctaagacagcaaggttttcaagtggtggatgctgacgcagtcgtccaccaactacagaaacctggaggtcgtctgtttgaggctctagtacagcactttggtcaaaaaatcatccttgaaaatggagaacttaatcgccctctcctagctagtcacatcttttccaatcctgatgaacgggaatggtctaagcgaactcaaggagagattatccgtgaggaactggctactttgagagaccagttggttcagacagaagctatctttttcatggatattcccctgctttttgagcaggactatgcttcttggtttaatgagacttggttggtctatgtggatcgagatatccaagtagaacgtttaatgaaaagagaccacttgtccaaagatgaatctgaatctcgtctagcagcccagtggcctttagacaaaaagaaagatttggctagtcatgttttagataacaatggaaatctggaccagcttcttactcaagtgcgtatccttctcgagggaggtaagcaatatgacagagattaactggaaggataatttgcgcattgcctggtttggtaattttctgacaggagccagtatttctttggttgtgccctttatgcccatttttgtggaaaatctaggtgtagggagtgagcaagtcgctttttatgcaggtttagcaatttctgtctctgctatttcagcggcgctcttttctcctatctggggtattcttgctgacaaatatggtcgaaaacccatgatgattcgggctgggcttgctatgaccattactatggggggcttggcctttgtcccaaatatctattggttaatctttcttcgcttactgaatggtgtatttgcaggatttgttcccaatgcaacggccttgatagccagtcaggttcccaaggagaaatcaggctctgccttaggtactctgtctacaggcgtagttgcaggtactctaactggtccttttatcgggggctttatagcagaattatttggcattcgtacggttttcttactggttggtagttttctgtttttagctgctattttgactatttgctttatccaggaagattttcaaccagtagccaaggaaaaggctattccaacaaaggaattatttacctcggttaaatatccctatcttttggtcaatctctttttaaccagttttgtcatccaattttcagcccaatcgattggccctattttggctctttatgtacgcgacttagggcagacagagaatcttctttttgtctctggtttgattgtgtccagcatgggcttttccagcatgatgagtgcaggagtcatgggtaagctaggtgacaaggtgggcaatcatcgtctcttggttgtagcacagttttattcagttatcatctatctcctctgtgccaatgcatctagtccccttcaactaggactctatcgtttcctctttggcttgggaaccggtgcgctgattcctgggattaatgccctactcagcaaaatgactcccaaagccggcatttcgagggtctttgccttcaatcaggtattcttttatctgggaggtgtcgttggtcccatggcaggttctgcagtagcaggtcaatttggctaccatgcagtcttttatgcgacaagcctttgtgttgcctttagttgtctctttaaccttcttcaatttcgaacattattaaaagtaaaggaaatctagtgcgagtaaaaattaatctcaagtgctcctcttgtggcagtatcaattacctaaccagtaaaaattccaaaacccatccagacaagattgaggttttaaagtattgtcccaaggaaagaaaagtaaccctacatcttgaatctaagtagattttatggtaaaataatagggattttaaggagtttgatatgtataacctattattaaccattttattagtattatctgttgtgattgtgattgcgattttcatgcaaccaaccaaaaaccaatccagcaatgtatttgatgccagctcaggtgatttgtttgaacgcagtaaagcacgcggttttgaagctgtaatgcagcgtttgacagggattttagtctttttctggctagccattgccttagcattgacggtattatcaagtagataagaaaataatgggcaggactaggtctttgcctctttttatttttaaaggatgtttgaaaaggttttacagtaaaagaaaattaaaaaatctagaaagaaaatatgaaagatagaataaaagaatatttgcaagataagggaaaggtaactgtcaatgacttggctcaggctttgggaaaagacggttccaaggattttcgtgagttgattaaaaccttatccttaatggaaagaaagcaccagattcgttttgaagaagatggtactctgaccttagaagttaagaaaaaacatgagattactctcaaggggatttttcatgcccataaaaatggctttggttttgtcagtctagaaggcgaggaggacgacctttttgtaggtaaaaacgatgtcaactatgctattgatggcgatactgttgaggttgtcatcaagaaagtcgctgatcgtaacaagggaacagcggcggaagccaaaattatcgatatcctagaacacagtttgacaactgttgtcggtcaaatcgttctagatcaggaaaaacctaagtatgctggctacatccgttcgaaaaatcagaaaatcagccaaccgatttatgtaaaaaaaccagcccttaaactggagggaacagaagttctcaaggtctttatcgacaaatacccaagcaagaaacatgatttctttgtcgcgagtgttctagatgtggtggggcattcaacggatgtcggaattgatgttcttgaggttttggagtctatggacattgtctcagaatttccagaggctgttgtcaaggaagcagaaagtgtgcctgatgttccgtctcaaaaggatatggaaggccgtctggatctaagagatgagattacctttaccattgacggtgctgacgccaaagacttggacgatgcggtgcatatcaaggctttaaaaaatgggaatttggagctcggtgttcacatcgcagatgtttcctactatgtgactgaggggtctgcccttgataaggaagcccttaatcgtgcaacttctgtctatgtgacagaccgtgtggtcccaatgcttccagaacgactgtcaaatggtatctgctccctcaatcctcaagttgatcgcctaacccagtctgccattatggagattgataaacatggtcgtgtggtcaattacaccattacacaaacggtaatcaagacaagcttccgtatgacctataacgatgttaatgatattctagctggcgacgtggaaaagagacaagaatatcagaaaattgtccctagtatcgaactcatggccaagcttcatgaaattttagaaaacatgcgtgtgaaacgtggtgccctcaatttcgataccaatgaagctaagattttagtggataagcaaggtaagcctgttgatatcgttcttcgtcagcgtggtgttgctgagcgcatgattgaatcctttatgctgatggccaatgaaacagttgccgagcattttagcaagctggatctacctttcatctatcgaattcacgaggagcctaaggctgaaaaagttcagaagtttattgattatgcttcgagttttggcttgcgtatttatgggactgccagtgagattagccaggaggccctccaagacatcatgcgtgctgttgagggggaaccttatgcagatgtattgtccatgatgcttcttcgctctatgcagcaggctcgctattcggagcacaatcacggccactatggccttgctgctgactattacactcactttaccagtccgattcgtcgttatccagaccttcttgttcaccgtatgattcgtgattacagccgttctaaggaaatagcagagcattttgagcaagtgattccagagattgcgacccagtcttccaaccgtgaacgtcgtgccattgaggctgagcgtgaagtcgaagccatgaaaaaggctgagtatatggaagaatacgtaggcgaagaatacgatgcggttgtatcaagtattgtcaagtttggtctctttgttgaattgccgaatacagttgagggcttgattcacatcactaatctacctgaattttatcatttcaatgaacgtgatttgaccctgcttggggagaaatcgggtacaaccttccgtgtaggtcagcaaatccgtatccgagttgaaagagccgacaagatgacgggtgaaattgacttttcttacatcccaagtgagtttgatgtgattgaaaaaggcttgaaacaagctggttgcaaagacagagggcgtggttcaaatcgtcgttcagataagaaggaagacaagagaaaatcaggacgctcaaatgataagcgcaagcattcacaaaaagacaagaagaaaaagggcaagaaacctttttacaaggaagtagctaagaaaggagccaagcatggcaaagggcgagggaaaggtcgtcgcacaaaataaaaaggcgcgtcacgactatacaatcgtagatacgctagaggcagggatggtcctgactggaactgaaatcaagagtgtacgagcagctcgaatcaatctcaaggatggctttgcccaagtaaaaaatggggaggtatggctgagcaatgttcatatcgctccttacgaagagggcaatatctggaaccaagaaccagaacgtcgtcgaaaactcttactccataaaaagcaaattcaaaaattggaacaagagactaaaggaacaggaatgaccctggttccccttaaagtctatatcaaagatggctatgccaagctccttttaggcctagctaaagggaagcatgactacgataaacgggagtctatcaaacgacgtgagcaaaaccgcgacatcgcgcgtgttatgaaagctgttaatcagcgataaaaagaggaatgaagatggaaaaactagttgcctataaacgcatgcctttgtggactaaagaaaccatgccagaggctgttcagcaaaagcacaataccaaggttgggacttggagcaagattactgttttaaaaggaactctcaagtttattgaattgacagaggatggtgaggttctagctgaacacctatttgaagcaggggctgacaatccaatggcgcaaccacaagcctggcaccgagtggaggctgtaacagacgatgtagaatggtacttggaattttattgtaaacctgaggattattttcctaagaaatacaataccaatcctgttcattcagaggtcctagaggcaatgcagacagtaaaaccagggaaagccttggatttgggctgtggtcagggccgtaactctctctttcttgcacagaatggttttgatgtgacagctgtagatcaaaatgaattatctcttgaaatcttgcaaagcattgttgagcaggaagacctagatatgcctgttggtctttacgatatcaattcagccagtattgggaaagaatatgattttatcgtttcaacagttgttctcatgtttctacaagcggaccgcattccagctattattcaaaatatgcaggagaaaaccagtgttggtggttacaatcttatcgtttgtgctatggacacggaggattatccttgctctgtgaacttcccattcacatttaaagaaggagaattggcagactattacaaggactgggaattggttaagtacaatgaaaatcctggccatcttcaccgtcgcgatgagaatggcaatcgtattcaactacgctttgcgaccatgctagctaagaaaatcaaataaacatgaatgaagattaggaattttcctgatcttttttcttttttacgaataatatagaaaaggagggaaatcatgtttgttgcgagagattctaggggagaattggtaaatgtgttagaggataagcttgagaagcaagcatacacctgcccagcttgtggaggtcagctccgtttgcgtcaaggaccaagtgtccggatccattttgcccacaaaaccttaaaagactgtgatttttcctctgaaaatgaaagtccagaacatctggaaaataaggaagtcctttatcactggttgaaaaaagaggccgaggtgcaattagaatacctgcttccagagcttaaacagattgcggatgtatttgtaaatggcaatctagctttagaggttcaatgtagtcccttgcctcaaaaagttcttaaagagcgtagcgagggctatcgtagtcagggttaccaagtactgtggttgctgggaaaaaaactgtggctcaaggagcgtttgactcgtctacaacaaggttttctctatttcagtcaaaacatgggcttttatgtttgggaattagacagtgaaaaacaagttttaagactcaaatacctgattcaccaagatctccgaggtaaactccattatcagattaaggaatttccctatggtcacggtagtttactggagatattacgttttccctataagaaacaaaaaatatctcattttacagtttctcaggacaaggacatctgtcgttatatccggcaacaactgtactatcaaaatcccatttggatgaaagaacaagcagaagcctataaaaagggagaaaatctcctgacttatgggctaaaagaatggtatccacaaattcgaccactagtaggtaatttttgccaaattgagcaagatttgattcgctattatctgtattttcaaacctattatcaagaaaatcctcaaaatgattggcaaatgctctatccaccagccttttatcagcaatatttcttaaaaaatatggtagaatagaaaggatggaggaatctaatggtattacaaagacatgaaataaatgaaaaagatacatgggatctatcaacgatctacccaactgaccaggcttgggaagaagccttaaaagatataacagaacaattggagacagtagcccagtatgaaggccatctcctggatagtgcggatagtctactcgaaattactgaattttctcttgaaatggaacgccaaatggagaagctttacgtttatgctcatatgaagaatgaccaagacacacgtgaagccaagtaccaagagtactatgccaaggccatgactctctatagccagctagaccaagccttttcattctatgaacctgaatttatggagattagtgaagagcagtatgctgactttttagaagctcagccaaaattgcaggtttatcaacactattttgacaagcttttgcaaggcaaggatcacgttctttcacaacgcgaagaagaattattggctggagctggggaaatctttggttcggcaagtgaaaccttcgctatcttggacaatgcggatattgtgttcccttatgttcttgacgatgatggtaaggaagttcagctatctcatgggacttacacacgtttgatggagtctaaaaatcgtgaggttcgtcgtggtgcctatcaagccctttatgcgacttatcaacaattccaacacacctatgccaaaaccttgcaaaccaatgttaaggtgcaaaactaccgtgccaaagttcgcaactacaagagcgctcgtcatgcagccctagcagccaattttgttccagagagtgtttatgacaatttggtagcagcagttcgcaagcatttgccactcttgcatcgctatcttaaccttcgttcaaaaatcctgggaatttcagacctcaagatgtacgatgtctacacaccactttcttctgttgaatacagttttacctaccgagaagccttgaaaaaggcagaagatgccttggcagtcttgggtgaggattacttgagccgtgtcaaacgtgccttcagcgagcgttggattgatgtttacgaaaaccaaggcaagcgttcaggtgcttactctggtggttcttacgataccaatgcctttatgctacttaattggcaggacaatttagacaatctctttacccttgttcatgaaacaggtcacagtatgcattcaagctatactcgtgaaacgcagccttatgtttacggagattattctatcttcttggctgagattgcatcaactaccaatgaaaatatcttgacggagaaattattggaagaagtggaagatgatgcaacgcgctttgctattctcaataacttcctagatggtttccgtgggacagttttccgtcaaactcaatttgctgagtttgaacacgcgattcaccaagcggaccaaaatggagaagtcttgacaagtgatttcctaaataaactctacgcagacttgaaccaagagtattatggtttgagtaaggaagacaatcctgaaatccaatacgagtgggctcgcattccacacttctactataactactatgtataccaatattcaactggctttgcagcagcctcagccttggctgaaaagattgtccatggtaatcaagaagaccgtgaccgctatatcgactatctcaaggcaggtaagtctgactatccacttaatgtcatgagaaaagctggagttgatatggagaaggaagactacctcaacgatgcctttgcagtctttgaacgtcgtttaaatgagtttgaagcacttgttgaaaaattgggaatggcataagatggttgaatcatatagtaaaaatgccaaccataacatgcgtcgccctgtcgtcaaggaagaaattgtagacttgatgcgtcagcgccaaaagcaggtcacaggatctttgaaagaattggaagactttgcccgcaaggaaaatattcccattattccccatgaaacggttgcttatttccgttttctcatggaaaccatacaacctaaaaacattctagaaattgggacggccatcgggttttcagccctcttgatggcagaacatgcgccaaaggcaaagattacaaccattgaccgcaatccagagatgattggatttgccaagaaaaatttcgcccagtttgacagtcgcaagcaaattacgctcctagaaggagatgcggtagatgtcttatctaccttgacagagtcctatgatttcgtctttatggattcagccaagtctaaatacatcgtctttctgccagaaatcctcaaacatttggaagtcggtggtgtggttgttttggatgatattttccaaggtggtgatgttgccaaggatattatggaagtccgtcgtggtcagcgaactatttacagaggacttcaaagactatttgatgcaaccttagacaatccaggactcaccgcaacattagtacctctgggggacggtattctcatgcttcgtaaaaatgtagcagatgttcaattgcctgacagcgaatgattttcagaaaaatttaagaaaatatagtaaaatagatagggtaacacttatctcaaaggagtagacatgaagaaaaaactattggcaggtgccattacactattatcagtagcaactttagcagcttgttcgaaaggttcagaaggggcagaccttatcagcatgaaaggggatgtcatcacagaacatcaattttatgagcaagtgaaaagcaacccttcagcacaacaagtcttgttgaacatgaccatccaaaaagtatttgagaagcaatatggctcagaagtagatgacaaagaagtcaacgatactattgccgaagaagagaaacaatatggtgagaactaccaacgtgtcttatcgcaagcaggaatgactcttgaaacacgtaaagctcaaattcgtacaagtaaattggttgagttggcagttaagaaagcagcagaagctgaattgacagatgatgcttacaagaaggcttatgacgagtacactccagatgtaacggctcaaatcattcgtcttgataatgaggataaagcgaaagaagtcctcgaaaaagccaaagctagtgatgcagactttgctcaattagccaaagataattcaacagatgagaaaactaaagcgaatggtggagaaatcacctttgattctgcttcaacagaagtaccagatcaagttaagaaagcagcttttgcgttagatgtaaacggtgtttctgatgtgattagtgttactggaacacaagcatacagcagccaatattacattgttaaactgattaagaaaacagaaaaatcatctaatattgacgattacaaagaaaaattaaaaactgttatcttaactcaaaaacaaaacgacgcatcatttgttcaaagtattatcggaaaagaattgcaagcagccaatatcaaggttaaagatcaagcattccaaaatatcttcactcaatacatcggtggtggagattcaagctcaagcagttcttcaaaagaataaaacagaaaagagccaagtgctctttttcttatgaaaaaatcttctatcttaagggtaagagtttttttctttcggaaaaaatggtataatagcaatcaaaactagaaaataaacggaatttgggaataatttcttttgttctcattagattggtgatactatgaagattagtaagaggcacctattaaactattctattctagttccttacttacttttatctattttgggtttgattgtagtctattctacaaccagtgccattcttatcgaagaaggtaaaagtgccctccaattggttcgaagtcagggaatgttttggatatttagtttaatattgattgccttgatatataagctgaaactgaattttttaagaaaagaacgactcttatttattgttatgtttgttgagctgattcttttggctctggctcgcttaattggtacgccggtcaatggagcctatggttggatttcagtaggacctttgaccattcagccagctgagtatttgaagataatcatcgtctggtacttggcccaacgtttttcaaaacaacaggatgaaattggtatttacgattttcaagttttaactcaaaatcaatggattcctcgtgcttttaatgattggcgctttgtcctcttggtaatgataggaagtttggctatcttcccagatctggggaatgcgactatcctagctctggttgccttgattatgtatacagttagtgggattgctcatcgttggtttatagcctttatcggtgtattggtaggagtttcagccctatccttatcagctatttctatgattggggttgataagttttcaaaagttccagtatttggttacgttgctaagcgtttcagtgcctactttaatccctttgctgatttggcaggagcaggccaccaacttgcaaattcctactttgccatggtaaatggtggttggtttggtctaggcttaggaaattcaatcgaaaaacgtggttatttaccagaggcccatacagactttgttttttcaattgtcattgaagagtttggatttgtgggagccagcttgattttagcacttgtctttttcctgattttacgaattatcctagtcggtattcgtgctaagaatccctttaattccatgatggcgattggggttggggggatgatgctggtacaggtatttgtcaatatcggtggaatttctggcattattccttcgacaggagtaacattccccttcttatcacaagggggaaacagtctcctagtcttgtctgtagccatcgcctttgtcttaaatattgatgcaagtgaaaaacgtgccgaattatatgaggagttagaagctcactcatcaaactatatgtagagttgatagtggaaaggatgacctatgtctcttcaaaaattagaaaactatagtaataaagctgtcgtgcaagaagaagtattgattttaacagaattgttagaagatatcactaaaaatatgcttgcaccagagacttttgaaaaaatcatgcagttgaaagaattgtcaactcaagaagattatcaaggcttgaaccaattggttacgagtctgtcaaatgatgaaatggcttatatttcacgctatttctctatcttgcccctcttgattaatatttcagaagacgtggatttggcttatgaaatcaaccaccaaaataatatcgatcaagattatcttgggaaattatcagcaacaatcaaaatggttgctgaaaaagaaaatgcggttgaaattcttgaacacttgaatgttgtccctgttttgacagcccatccaacacaagtgcaacgtaagagtatgttggatttgaccaaccatatccacaccctcttgcgtaagtatcgtgatgtgaaattaggcttgattaataaggaaaaatggcataatgatctccgtcgttacattgagattatcatgcagacagatatgattcgtagaaaaagaaattgaaagtaaccaatgaaatcacgaatgttatggaatactacaatagttcattcctgaaggcagttcctcatttgactgctgagtacaagcgtctggctaaaaaacatggcttggagttgaaacatcctaaaccaattaccatgggtatgtggattggtggagaccgtgatggtaatccatttgttacagcagataccttgaaacaatctgctatgactcagtgtgaagtcatcatgaactactatgatgaaaagatttaccaactttatcgtgaattctctctctcaaccagtattgtcaatgtaagcaagcaagttagagaaatggctcgtcaatccaaggacaactctatttatcgtgaaaaagagctgtatcgtcgtgccttgtttgatattcaatcaaaaatccaagcaacaaaaacctatctgattgaagataaggaagttggagctcgctatgaaacagctaatgatttttataaggatttaattactattcgtgattccctcttggaaaataagggtgaagcactgatttctggtgattttgttgagttgatccaggcagttgaaatttttggtttctatttggcatctattgacatgcgtcaagattctagtgttcacgaagcctgtgtagctgaactcttgaaatcagcaggtattcattctcattatagtgaactaagtgaagaagaaaaatgccagcttctcttgaaagaattggaagaagatccacgtattctttctgccactcatgttgaaaaatcagaattacttgaaaaagaattagcaatctttaaggcagctcgtaagttgaaagataagttgggagatgatgtcattcgtcagaccatcatttcacatgcaaccagcgtatcagacatgctggaattggctatcttgctaaaagaagtagggctagttgataaagaaagagctcgtgtccaaatcgttcctctctttgaaacaatcgaggacttggatcactcagaagaaaccatgagagagtacctttcacttcctcttgctaagaaatggattgcttcacgtaataactaccaagaaatcatgcttggttactctgatagtaataaagatggtggttacctttcatcatgttggaccctctacaaggctcaacaacaattgactgctattggagatgaatttggcgttaaggttaccttcttccacggccgtggtggtactgtcggtcgtggtggtggaccaacctatgaggccatcacctctcaaccgctcaagtctattaaggatcgtatccgcttgacggagcagggtgaagtaattggaaataaatacggtaataaagacgcagcctactataaccttgaaatgctagtatctgcagccattaaccgtatgattactcagaagaagagcgataccaatacatccaatcgttatgaagctattatggaccaagtggtggaccgtagttacgatatctaccgtgatttggtctttggcaatgaccatttctatgattatttcttcgagtcaagtccaatcaaggctatttcaagctttaacattggttctcgtccagccgctcgtaagactattactgaaatcggtggtttgcgagctattccttgggtattctcatggtcgcaaagtcgcgtcatgttccctggctggtatggggttggttcaagcttcaaggaatttatcgataaaaatccagagaatatcgctatcttacgagacatgtaccaaaactggcctttcttccaatcgcttctttcaaatgtcgacatggtcttgtcaaaatcaaatatgaacattgcttttgaatatgccaaactgtgtgaggatgaagaagtcaaagcaatctatgagactattctaaatgaatggcaagttaccaaggaagtcatcttagctattgaaggttacgatgaactcttggctgaaaatccatatctaaaagcaagtttggattaccgtatgccttactttaatatcctcaactatatccagttggagttgattaaacgtcaacgccgaggagaattatcaagcgatcaagaaaaattaatccatacaaccatcaacggaattgcaacaggattgcgtaattcaggctgatgcctatcaaacttcctcttttctataggggaagtttttgaatctttcaaaaaaatgctaaaagagtcttgacaagtagttgaaaaatgatataatttaaccattcagaaaagtaatcataataaactttttagagagtctgtggtagctgaaaacagataagtgtgatgatgaaaattgggctgaatggtatttagaatttgaaatcataaaaattcggtgagcacaccttacagtgcatctcgttattgcgagacagagcgatagggaaattccctataattgaggtggtaccgcgcatcgacgtcctcacacaagttttttgtgtgaggacttttttgatggaggttagtatggaaagaaaacgatggcgtagcttgttgagataagtgaagtattttaaaggaataaaaggagaaatagaatgaaaaataaacgtttaattggaattatcgctgcattagcagtcttagtagcaggaagcttgatttactcttcaatgaataaaccagaagctaaaaatgaaaagaaagttgccaaagttggtgtccttcaatttgtgagccatccatctcttgatttgatttataaagggattcaagatggactggcagaagaaggctataaagatgatcagttgaaaattgactttatgaactcagaaggtgaccaaagtaaggttgcaacaatgagcaaacagttggttgcaaatgggaatgaccttgtggttggtattgcaacaccagctgctcaaggcttggctagtgccacaaaagacctaccggttatcatggccgctattacagacccaatcggagctaacttggtcaaagatttgaaaaaaccaggtggcaacattacaggggtatctgaccacaacccagctcaacaacaagttgaactcatcaaagctttgacaccaaatgtgaaaacaatcggagccctttactcaagcagcgaagacaattcaaaaacacaggtagaagaatttaaggcttatgctgaaaaagcaggtttgacagtggaaacatttgctgttccttcaacaaatgaaattgcttcaacagtaaatgttatgactagcaaagttgatgctatctgggttccaatcgacaacacaattgcttcagccttctcaactgttgtttcaagtaatcaatccgctaaaaaaccaatttacccaagtgcaactgcaatggtagaagctggtggtttggcatccgttgtagttgaccaacatgaccttggtgtggcaacaggtaaaatgattgcggaagtcttgaaaggtgctaaaccagctgatactccagtcaatgtcttttcaactggtaagtcagtgattaacaaaaaattggcacaagaattaggtattacgattcctgaatctgttctaaaagaagcaggacaagtgattgaataatctacaatggaggagttggggacatctcctccaattttttacaatagaaatcatatagaaaaggttaagaaacagatgatattatctattatttctcaaggatttgtctgggctattttaggtctggggatctttatgacatttaggattttgaactttccagatatgacaacagaaggttccttccctcttgggggagctgttgctgtcactttgataaccaaaggtgtaaatccctttttagcaacacttgttgctgttgcagcaggttgtttggctggaatggcagcaggccttctttatacaaaagggaagatcccaaccttgctctcagggattttggtgatgacttcctgtcactctatcatgctcttgattatgggacgtgcaaatttaggattgcttggaaccaagcaaatccaggatgttttgccttttgattcagatttgaaccaactcttgacaggtctcatctttgtcagtcttgttattgctctcatgctctttttcttggataccaaactcggacaagcctatattgctacaggtgacaatcctgatatggctagaagtttcgggattcatactggacgcatggagctcatgggcttggtcttatcaaatggtgtgattgcccttgcaggggctcttattgcccagcaagaagggtatgccgatgtatctcgaggaatcggggtgatcgttgtggggcttgcaagtttgattattggagaagttatcttcaagagtttgagcttggcagaacgtctggttaccatcgttgtaggttctatcgcttatcaattcttagtgtgggcagttatcgctcttggctttaatacaagttaccttcgtttgtacagtgccgtgattttagcagtctgcctcatgattccaacatttaagcaaacaatcttgaaaggagccaaattaagcaaatgacagcaattgtagaattaaaaaatgcaaccaaagtcgttaaaaatggctttgatgaagaaaagattattttaaatgatgtttccttagaaatttttgaacaggatttcatcacgattttaggtggaaatggagctggtaaatcaactctctttaacactattgcaggaaccttatccttaaccagtggaaccatccgtattttaggtgaagatgttaccaagttttcaccagagaagcgggctaagtatctgtctcgagtcttccaagatcccaagatggggacagctccccgtatgacagtggcagagaatctcttgattgctaagtttcgtggtgaaaagcgtggattgttaccacgacgcttgtctagttataaggatgaatttcaggcaaccattgaaaaagtaggaaacggtcttgagaaacacttgaatacaccgattgagttcttatcaggtggacaaagacaggctttgagtctcttgatggcaaccttgaagcgacctgaattactcctgttagatgagcatactgcagcccttgatccaaagaccagtgtggccttgatggaattgacggatgaatttgtcaagaaagaccagctgacagcgcttatgattacccaccatatggaagatgctctcaaatatggcaatcgtttaattgtcatgaaagaaggacgaattatccaagatttgacccaagaagaaaaagcaaaaatgaaaatctctgattattatcagctctttgaataaagtagggaaaatgagtgaaatggtttactttttttctgaaataaagtatactatataaagtaaactatgataacatggaggtattgtgtatggttgacaaacaagtcattgaagaaatcaaaaacaatgccaacattgtggaagtcataggagatgtgatttctttacaaaaggcaggacggaactatctagggctctgtccttttcatggtgaaaaaacaccttctttcaacgttgttgaggataagcagttttaccactgttttggttgtggccgctcaggtgatgtctttaagttcatcgaggagtaccaagggattccctttatggaggctgtccaaatcttaggtcagcgtgtcgggatagaggtagaaaaaccgctttatagtgaacagaaatcagcttcaccccaccaagctctttatgatatgcacgaagatgctgccaaattttatcatgctattctcatgacaacgaccatgggggaagaggccagaaactacctttatcagcgtggtttgacagatgaagtgctcaagcattttcggattggtttagcacctccagaacgaaactatctctatcaacgtttgtctggtcagtatcgggatgaggatttcctagattcaggactgttttatctctcggatgctaatcaatttgtagatacctttcacaatcggattatgtttcccctgacaaatgaccagggaaaggttattgccttctcaggtcgtatctggcagaaaacggattcacaaacttctaagtataaaaatagccgatcgactgcaatttttaacaaaagttacgaattatatcatatggatagggctaaaaaatcttctggaaaaaccagtgagatttatctgatggaaggattcatggatgtcattgcagcctatcgtgctggaatcgaaaatgctgtggcgtctatgggaacggccttaagtcgtgagcatgttgagcatctaaaaaggttaaccaagaagttggttcttgtttatgatggtgataaggctgggcaagccgcgacattgaaagcgctggacgaaattggtgatatgcctgtgcaaatcgtcagcatgcctgataacttggatccagatgagtatctacaaaaaaatggaccagaagacttggcctatctgttaacgaaaactcgtattagtccgattgagttttacattcatcagtataagcctgaaaacagtgaaaatctgcaggcacagattgagtttattgaaaaaatagctcccttgattgttcaagaaaaatctattactgctcaaaacagctatatacatattttagctgacagtctggcgtcctttgattatgcccagattgagcagattgttaatgagagtcgtcaggcgcaaaggcagaatcgtatggaaggaatttccagaccgacgccaatcactatgcctgtcaccaagcagttatcggctattatgagggcagaagcccatctactttatcgaatgatggaatctccccttgttttgaatgattaccgtttgcgagaagactttgcatttgacactcctgaatttcaggttttatatgacttgcttggccagtatggaaatcttcctccagaagttctagcagagcagccagaggaagttgaaagagcttggtatcaagtcttagctcaggatttgcctgctgagatgtctccgcaggaactaagtgaagtagaaatgactcgaaacaaggctctcttgaatcaggacaatatgagaatcaaaaagagggtgcaggaagctagccatgtaggagatacagacacagccttagaagaattggaacgtttaatttcccaaaagagaagaatggagtaataatggcaacaaaacaaaaagaagtaacaacatttgacgtacaagtagcagaatttatccgtaatcataaacaaaaagggacagcaactgatgatgaaatcaatgctagtctggtgattccttttaccttggatgctgatgggattgaagacctcttgcaacgaattcaggatgcagggatttctatcacagataacgaaggaaatccgagtgcgcgtgttcttagcactgaagaagaaccagaactcagcgatgaggatttgattggttcaacttcggctaaggtcaatgaccctgtccgtatgtacttgaaagaaatcggggtcgttcctcttttgaccaatgaagaggaaaaagaattggcactagcagttgaagctggtgatatcgaagccaaacaacgtcttgcggaagccaaccttcgtttggttgtttctattgctaaacgctatgtcggtcgtggtatgcagttccttgacttgattcaagaagggaacatgggcttgatgaaggcggttgacaagtttgactattctaaaggattcaagttctcaacttacgcaacttggtggattcgtcaggctatcactcgtgctattgcggatcaagctcgtactatccgtatcccagtccacatggttgaaaccattaacaagcttgttcgtgaacagcgtaatctccttcaagaattgggacaagatccgacaccagaacaaatcgctgaacgtatggatatgacacctgataaggttcgtgaaatcttgaagattgcccaagaaccagtatctcttgaaactccaatcggtgaagaggatgatagccaccttggagactttatcgaagatgaagtgattgagaatccagtcgactatacaactcgtatcgtcttgcgtgagcagttggatgaggtcttggatactcttacagaccgtgaagaaaatgttttgcgtctgcgttttgggctagatgatgggaaaatgcgtacccttgaagatgtgggtaaagtctttaacgtgactcgcgagcgtatccgtcagattgaagctaaagctttgagaaaactacgccaaccaagtcgcagcaaaccgcttcgtgattttattgaagactaagagtgaggatgaatatggcttatacagaagagcaaattgaaaatatcaaaacacgaattttatcagccttggaagaagttattgaccctgagttgggaatcgatattgtcaatcttggtttgatctatgagattcgttttgacggcgacacaggacaaacagagattgatatgactttgacaaccatgggttgtcctctagcagaccttttgacagaccagatttatgatgctatgacagaggttccagaagtaacggatactgaggtcaaattggtttggtatccagcctggactgttgaaaaaatgagtcgctatgcacgcattgccctaggcattaagtaaacatataaaacatgtgagagattattggaaaagctaggaaatttcccctcttttccctagtctctcctttcttttgctgattttattcaaagaaaatgatataatagtagttatggaaaaaaagaaattacgcatcaatatgttgagttcaagtgagaaagtagcaggacaaggagtttcaggtgcttaccgtgaattagttcgtcttcttcaccgtgatgccaaggaccaattgattgttacagaaaatcttccaatagaggcagatgtgactcactttcatacaattgatttcccctattatttatcaacattccagaagaaacgctcaggaaggaaaattggttatgtgcacttcttgcctgatacacttgaggggagtttgaaaattccatttttcttaaagggaattgtgaaacgctatgtattttctttttacaaccggatggagcacttggtggtggtcaatccgatgtttatcgaggatttggtggcagctggtattccacgtgaaaaagtgacctatattcctaactttgtaaacaaggaaaaatggcatcctcttccacaggaagaggtagcgagattgcgtacagagctaggtcttagtgacaatcagtttatcgtagtaggtgctggtcaagttcagaaacgtaaaggaattgatgactttatccgtctggctgaggaattgcctcagattacctttatatgggcgggtggtttctcttttggtggtatgacagatggttatgaacgttataagaaaatcatggagaatccccctaaaaatttgatttttccaggtattgtatcgccagagcggatgcgcgaattgtatgccctagcggatcttttcttgttgcctagttataatgagctctttccgatgacgattttagaggctgccagttgtgaagctccgattatgttgcgtgatttagatctttataaggtaattttggagggagattatcgggcgacagcagatagagaagagatgaaagaagctattctggaatatcaagcgaatcctgctgctttaaaagatttgaaagaaaaagctaagaatatttctagagagtattcagaagagcatctgttacaaatctggttggacttttatgagaaacaagccgctttagggagaaagtaaaaagtgaggtaatctatgcgaattggtttatttacagatacctattttcctcaggtttcaggtgttgcgaccagtattcggaccttgaaaacagaacttgaaaagcaggggcacgctgtttttatctttacgacgacagataaggatgtcaatcgttatgaagattggcaaattatccgcattccaagtgttcctttctttgcttttaaggatcgtcgctttgcctatcgaggattcagtaaggcgcttgaaattgctaaacagtatcaactggatattatccatactcagacagaattttctcttggtttgttggggatttggattgcgcgtgaattgaagattcccgttattcatacctatcacacccagtacgaagactatgtacattatattgccaaggggatgttgattcgtcctagtatggtcaagtatctggttagaggttttttgcatgatgtggatggggtgatttgcccgagtgagattgtccgagacttgctatctgactataaagtcaaggttgagaaaagggtcattccaactgggattgaattagctaagtttgagcgtccggaaatcaagcaggaaaatttgacagaactgcgtactaaactaggaattcaagatgatgaaaagatgttgcttagtctttccagaatttcctatgaaaaaaatattcaagcagtactagcagcctttgcagaagttctgaaagaagaagacaaggtcaaactggtggtagctggggatggtccttatctggatgacctcaaagagcaagccaagaaactagagattcaagactacgtcatctttacaggcatgattgctcctagtgagacggctctttactataaggcggcggatttcttcatctcggcatcgacaagtgaaacgcaaggtttgacatacttggaaagcttagccagtggaacgcctgtcattgctcatggaaatccttatctggataatcttatcagtgataaaatgtttggaaccttgtactatggggaacatgatttggctggagctattttggaagccctgattgcaactccagatatggatgagcataccttatcagagaaattgtacgagatttcagctgagaactttggaaaacgagtgcatgagttttatctggatgccattatttcaaataacttccagaaagatttagcaaaagatgatacggtcagtcagcgtatctttaagacagttttgtatctaccgcaacaggtggttgctgtgcctgtaaaaggctctagacgaatgctgagggcttcaaaaacacagttaatcagcatcagagattattggaaagaccatgaagaatagaaagaggaatagctatgaaaaaacaattgatgagaagtggtagtgatcaaaaaattgctggagtatgtgctggggtcgcaaattattttgatattgatccgactattgttcgtgtaatatggggtgttcttgcattttgttatggggcaggaattgtagcttatatcattttatggattattgcgccggtagcaagtgactattgaaaactagctaaattcatgctaagataatagaaaatagaatgtaacgaaggagataaaaatggcatttggagataatggaaaacgtaaaaaaactatgtttgagaaattaaccttgcttatcgtacttatcatgttagtagcaagtattttgggtatttttgcaactgcaattggtgccctcagtaatctataaaatagattcaagaaaattttgtgactgggatttcccagtcccttttttaaagtgagaagaaaaaatgagtatgtttttagatacagccaagatcaaggtcaaggctggtaatggtggcgatggtatggttgcctttcgccgtgaaaaatatgtccctaatggcggtccttggggtggtgacggtggtcgtggaggtaatgtcgtcttcgttgtagacgaaggtctacgtactctcatggatttccgctacaatcgtcatttcaaggctgattctggtgaaaaaggaatgaccaaagggatgcatggtcgtggagctgaggaccttagagttcgagtgccacaaggtacgactgtgcgtgatgctgagacaggcaaggtcttgacagatttgattgaacacggtcaagaatttattgtagcccacggtggtcgtggtggtcgtggaaatatccgctttgcgacaccaaaaaatcctgcaccggaaatctctgaaaatggagaaccaggtcaggaacgtgagttacaattggaactaaaaatcttggctgatgttggtttagttggattcccatctgttgggaaatcaacacttttaagtgttattacctcagctaaacctaaaattggtgcctaccactttacgaccattgtgccaaatctaggtatggttcgtacccaatcaggtgaatcctttgcagtagctgatttaccaggtttgattgaaggggctagtcagggtgtcggtttgggaactcagttcctccgccacattgagcgtacccgtgtcatccttcatattattgatatgtcagctagcgaaggacgtgatccttatgaggattatcttgctattaacaaggagttggagtcatacaatcttcgtctcatggagcgtccacagattatcgtagccaataagatggatatgcctgagagtcaggaaaatcttgaagaattcaagaaaaaattagctgaaaactatgatgaatttgaagagctaccagctatcttcccgatttctggattgaccaagcaaggtctggcaacgctcttggatgctacagctgaattgttagacaagacaccagaattcttgctctacgacgagtcagatatggaagaagaagcttactatggatttgacgaggaagaaaaagcctttgaaattagtcgtgatgacgatgctacatgggtactttctggtgaaaaactgatgaaactctttaatatgaccaactttgatcgtgacgaatcagtcatgaaatttgctcgtcaattacgtggtatgggggttgatgaagcccttcgtgcgcgtggagctaaagatggggatttggtccgcattggtaaatttgagtttgaatttgtagactaggagactgatatgggagataaaccgatatctttccgagatgcggaaggcaacttcgtctccgctgcagacgtttggaatgaaaagaaattggaagaactatttaatcgtctcaatccaaatcgtgctctgagattagcacgaactaaaaaagaaaatccatctcagtaaagaatataacaaaattccgtgccacatgagacacggaattttcttattcttcaaagaaaaatggtggagcgaattttttcaattcttcaaagcatttttgagcagcttctgcatcttcacagatgacgagacagacatcatctccacagagagtagcgatagcgtcagggaagctcaaagcatcaatgatagaaccaaaggattgagcaagtccaggaagggtttttagtaggacttggtgttgaacggggcgcatcaagacaagagcatcctccatataaatttcgagacgtttttcccattttgagatagaacctgtattgagcacgtagtaagagttgtcttcttctcgtacttttgaaaggttcatacttttaatatctctcgaaagtgtagcttgtgtaacttgaatatcattatcggcaagaagagcttgtagctcagcttgagtatgaatcttgtttttcgttacaagagctcgtatgagttggtgtcggtgttcagatttattcataaaatattactccttgtactaggtacagaaagcgtggactgaacgaaagcgtcagtcgggtggtaagcggtattgtcacgtatgatgatttcaaagtcagtagtataggactaaatggagaaaatcccacacttttaacttgtcactagttgggtgtagatgaattgggtatctatctgtttatctacattggtgtcctctactaacagtaaatcattcaattagggtagccttttgtcacgacttgttgtgaatttacgattaatgtcaaatcacagagattttccaacatgtggtgtggtagcgagtgttattaatgagtacacatgttggttagagtcttagtatcttttgtctaagctcccgtgtagacctatcataagcccatattgggattgaagttgataccaagtttatgtttgtttcaactgtttaagtggaaatcttccatattgaaagtctgatatcataccttttgacaaggtaggataaggctagactgttctagatcgacagtcaggtggtaagcggtattgtcacggattgttatttcaaagtcagtagtatagaggactaaacgaagagtatctccttcttttaacttgtaaatagttggttgcaattcaaattggatatccatccattcatcttcagtaatattctctactaacagtaaatcatttctattttgtaaattgaggtagccttttgtcacgatgcgttgtgcattttcacgaaaaggcaattcgttaagattttccaacatgtagtagcgaccgttgtcaatggttctagcacttaatacagctggataaggttgtaggtatttcttctgtccaaattctagcagttgggcagataagagccccttatttgtactggatttgatacgaagattgagttgggcacgaccgttcaggtggagatccttggtcacaggaaggtcaatagtaatctgattgactttcccttgatagagttctgtattgaaggtctggtaagtcttaccataacgctcaaaatccttatctgagtactggttttgaataacttgctcttcttgaccaagtgcgaaggtttcaaagttttcttgcccaccaaagttatcaagtgataaccaagtctgaggagttgtattatcctgccagataacagtaggaagttggtaatccgtttcctgttccagtaatttctttgtcaacaaagcattcatggactcacggaaatcaatggactgccagttattcatataaacatgggcaccattatggaaaaagaggtgcttatttatattatcaggaagggcgtgaaacatctgataaacatgaagtggtttgacattccaatcctgtgaaccatgagtaaagacaacctctgcctttaccttatgggcattaagcagataattgcggtcatgccaaaactgattgtagtcgccagacttgcgatccagttgcacttttactttttctaagtcagcttggtgagactcattgccacggatatagtcaccagccaagagattacgagagtaggttagttcagcaagggagtcaaagtcctcacctggataaccacctgggctagttactagaccgttttcacggtagtagttgtaccacgaagaaataccagcctcggcaatgataacctctaaaccatctacacctgtagtcgcaagaccattggacatggtacctagataggaaagtccagttgtggcaacttttccgtttgaccagtcagccttgacttgacgctggcgcgtatggtcagtaaaggcacggcaacgaccattaagccaatcgataacatttttataagcctctatttgctggtagtccccgttagtcatgaaaccagtagagtctttggtaccaacacctgagacatagagattagcaaaacctcgtggaaggaagtagtcgttgagtgtatagctagagttgatgtgtgttagcttttcctcagcttctgacacaagctcagcttgaccttggagttggacgagatttagttggggttcctctagctcaatcttgtgagcaggcttaacctcaagatagccctccatcttgtaaagagctttatcgctggccttgtcattggttccctgatggtagggactggcagtcatgatagcagggatttgcccatcataacgaggacgaataatgctgaccttgactaggtctggtagacctttttggtcagtatcgacacgagactcaacgtaaacgacttctcgaatggcatcatggctagaaaaagtagccaaactcttgccgttaaagtagtgatagtcattatcctcaggaataagaccgtcgctgacaagttggtcgataagagtgttcccctttttagtgcgagtattgagtaactgatagagattttcaaccaagtcaccatatacaatgggaaaaccagtctctttgcgaaaagcttcgccgtcttcaaagtcaatcaaataagaaaatcctaaaagttgaaaagccacagtatagaaaatatctgcagtcaactctttatctgattgaaaaaatgtcaataagtcagtttctttatcaactgctaaactggatagaggataggagctgtttttaaaattaaaaaagaaacgaataagaaacgcttcaagcatttgtttatttgtaatgttgactggtaaatcaaatccatacttttttaattcaaagataattgtatctctaggtagtgctaaatagctgaattgattaaaacgcataagacctccaataaaattttacttaagattattatatcaaaaataatgcctaaaaaccaagattaatctttctgtagaaagatatttaccattatatattacaacagtttaatttttaaaaacgaaagaaaattccattatcaaatgatatagaaaatgttcaaattctttgaaatgaatacgattgcatggtataatatatcgtatgtaattgtaaaatttagttacataaaaaatataggaagtgaacattatgtataaatcaaaaagacaaaaaaataagtcttttgattggtatggcttgagccaacgtttctctattcgtaagtatcattttggtgctgcgagtgtgctgttggggacagccttgattttgggtgctgcccaaacgactgccaaggcagaagaaacagctactgaaaataaaacagaagctgttgcatctgctccaaaagatgataaggcaggtgagaatgtcgcaaatgtgacgacaccagctctttctgctacgacagaagcggctgtaatagaaaagccaaccttgagtgatgaggaagttgcaaaattagctgctgaagcatctaagaaagatgataaagcagctgaaacagctacaactgaaaaaacagaagcagctgacaaagaaaaagcaacactaactgctccttcaacagacaaaaaagctgataaagcagttgatgaaaaagctgataaaaaggacgaaaagaaagcagaaaacccaattactgctactaaaactgtccttgaacagttgacatctgaagcagaagtattgaacacaactgcctcaaactttgcgaataaaaaggcagaagataaagctggaaaagaagcaatcgcaactgcagttgcttcagctaaaattcaaatcgaagcttctaagaaagctcttgctgctggagaaatcactaagcaagaattggatgcccaactccaacgtatctcatctgccatcgaagcagtctatgctgagatgaagcgtgcaggacatgtaggtaaagttgaagcagtattggcggatggagcaggttctacagtagctattgctaatcctattaacaaagttgttgttaacaatgttggcgatattaccgaagaagaagcgcgtgccattgaaaaagaaatccgtactgcaaatccatccttgacagctgaagataaaatcgaagttaaacgaaaaggtaatacaggtgctgccgtagcaactgtaacattggctaatggtaaggtagatcaaaatggtagtaaaacatataattttgctattggtgatgtagcttatggttcagctggtgaaaaaaactatagtcaactccgtgaagcaatcaactggtttgacttcgctactgcgtctattacatatgctgatggaacaaaagtaggtgctgttgaatatgttaataatccagctatggttgatttcacgagctctaaaggacgtcaagaacgcggccgttttacaatggttcgtacagttcttgaatctacaactcatccagagttagtaggtaagaaaacaaatgatccggcatttttagcgtctggattagctaaatatacattgtggaaaacatatgatcatgtgaaacatgaagtgcaacaaggtctatctgaaggacgatttaataatgaaatatttgaggttcttcaagaaggaatgcgtttcgatgtaccaactaaggtaaaaggttatacattaagtgcaacagtaagttccctttctcgtaaaaaagttaccacagaaacatatactttaaataaagctaatggtgaacctgaaaatatcaacagaagccctgttgatggtgttgttcaacgtgaagacgtcattgtaacaagacaagatccgaactggagtcatttacgattagcaggatttgaaactaaatatgaagattcaaacggggtaactcgtgaacgattaactgcctttgctccagcttatgatggtggtaacgttggggttaagttccaattatcagcaacatataatggacgcccagtcgcggttaatgcgattgcagttgattcagaagatttaggtgcggcagaatttactcagttcgaatctgatggaacaccttgggaagagttcatgcgtttgaataaaaacaaaacggcttctaaaggtttattccctaatagaaatattaactctaactttacatatactttcgatagaaaaacaaatgcaaggttatcaacaggttataatctttctgagtgggcgaataaaacggaaacaggttatggaagccaattgttcggacctttcaattcaggtattaatgatggttatgatcttcctataggtcttactcaaaatgttgagaacttaggagtttacattaatgccaatggtagccaatcagcaacagtaggtttcgttatttatgatggtggggatgcaccagcctcttatggttcagcacaacacatcattggtaactttaataaagataagaatggaacgcaagtaactgcgacacaaccatatttaggagatgttcctgcagatacagacttccgtacaacaatcactgagccgaatggagcttgggtacttgatgacttagtgaactcagaagattataaagaaatcagtcttgttagcggttcaacgcaagttacaaactctaaaggtcaatcaggaacatacttattagatggtaaaaaccctgtaattcgtatggctgatggaacgcaagtagcgattaaaaatggtgaaattctatcaacagctaatacattacaaggtggagatggtttaccaattaaaggattgtataaccaagctacacgtggacttggtgtagggaatctaccagatgaaggagaaggacaacttcttgatccagcagttgcgactaagtacacactacgtcatgcaagtgaaaatgaatatatcttaaaaggtgtcaaagttaaccgtggtgtcaataatgatgtagcctatgttcgtggatgggttgactttaacggtaacggtaaattcgatctttatgaatcatctgaattagtaacagctaatgctgatggaacatatgatatcaccttcaaaaatacacctcaattattaaacacatcagtagataatcttggtgttcgtttacgtgtttctgtagacaaaaacgacttaagattaccaacaggattagcgtcttcaggggaagtagaagactttgttgcgaacgttattcacccacctcgtggaacacgtcatgaaacaaaagattttcaagggaaaaaacaagaagtgaatttccctaccaacgctatgttcaaggctagtggtaaaacaattgaatctaactataaacaatgggcggaaattgataataatacggcgcctaagatggtgttaaatgatacggttgttaaatctgaagaaccaactggtaagactgttgaagtaaaagaccacttaagccaaacaatctataacggtacggaagttgttgttaaagatgcaagaggaaatactcttggtacagctgttaaagtaacgaataaattgacaggtaagactgaatattacttatctgaatatactgaatatgatacagctgggaataaagttggggtttataaactaaatgaaggttctgcagaaggtaagaatactacacaaggttctctaagctttactaagattagttttcaaccagaagcaggatttgtaggtacagctaaaggggtagctatccgcgcgtgggatgataatggaagtcacactggatgggaagctacagaagatacaattaaagaatctctaacaagtacgactctagctgaaaaagataaagtattagaaaatgtaaacaatggaaataacggtgccaaatcaatggatactagttatattccaacggtaatcgacgttcgtccagtaggagaagatactactactgaggatgttcaaggtgctgttcaaaaatctaatccaactatcccagtttatggaactgttgaaactgttacgaatgataaagtagaagacgttaagtatacagctgattatgtaatactagataaaactaagaaaccaacttttgcaactagaaaagaaacaccagggaaattatatacagaagatacaaaagttgataaggaaacaactgttacactaacagatggaacaacagtcacttataaaccagcagataaaattccggcaggaactacaatagcgaatactggtgatgtgaatgttacaggaacaggaaatgtcactgtaaataacattcgattagtttcaggtactacgatccctgctggtgcaaaacctcaaagcaatcacccagcaccagtggaagtaaaagtaacattagcgaatggaacagagcaaacaattccagcgggaggaacaattccagcaggagctactatcaatacgccatttactaattcagctaataatacattcgacaatgtaacttataatactggacaaacaattccgcgtgaaaccggaaataagatttcaactttagccaaggaaacatcagcagatcagttagttccaaaaggtgaaagtattacacttaatggaacaacttacaacgcaaataatgatgtgattccaaaaggaactcgtactgctgcgacatatgaagacttaatgaacgtaactcttccaaatgcagttcacatcgatccacaaacaggagaagtgacaagtgttccacgtcgttacactaaagtaactgatacagaaatcgtaattgaaaacgaaggtacttacacattaaaccaagatactggtgaaattactttcacaccagatcctaagttcgtaggaactggtactggtgtagtaaaacaacaaccagatgttgactataacgataaagtagctggggacccagtaacaagtaaatatggtacagactttggtaaagcaacttatacaccaatcgttaagccacagtcaaaagcttcaatcactcgtacaattcattatgtatatgaagatgctaatgataatccagcaagtcaagattcatataaagataatgctccaatcgtagcaatcgataatacaccagttactcgtacacaaacgatcgactatactcgtgaatacaagattttctctgaagcgggaactactgataaggcaatcacaactgcgaaccaagttacagatgcaactgggcatgtttataaagttggagatactatcccagcaggaacacagttcaatcaaggttcaattatcatcggtaaatggactgcttcaagtgatgcaaactctaaatttaaagaaattatctcaccaacagttaagggatacactgctgaagtagtaacagctaacttcacaccaaatgctgatggtaagatgggacacatccacaatggtaaacaacctgttggattgtatactccagtagctgacaatactagagatgttggtgcatacgaaccattagtatcagaagttcgttcagacgacaaagatgacttcgatatgtatgttgtttacaaagctgatattcaaaaagctaaagtaacatatatcgatttagatgcaacaggtgatgctcgtattcttgaagttcaaaacgctaatccagctcctgtaacaggtgcagatgcgaaaacaacttatggtgttacaacgcttcaaggtaaatctcatacgaagattccttatacaacagctgaaacaatcaaaaaatatgaagaccaaggttatgaattagtaacagatgactatacaaataactctcaaggtacagctgtagaaggtggacgtaagtttgatgatgataaagaagtagatcaagcattcaatgtctacctacgtcacaagaaagttactcgtaaaattaaagatacccaagaagtgacacgtacaatcgagtacaaatatgcaagtacagatgatgtaccagcagataaacgtggaacaacagcagcaccaacagtgactgaaacacttcactatgaacgtgaccgtacaatcgattacacattagctgcaaaagaatatccaacagaatacgctacttataaggctgtattggataagagtggatatgattctccagaagaatacaaagctcgtacagtttactacgatcacatcacaaacaaagcaattgcagcagatgcaacagctgctcaaaaatcaatcgttacatttggaccatggactccagtaggtggaacatctaacgatgcgattacattatctgatgcagaaaaagctaaagatgataaattcaaccttgttaactctccagaagtaactggttatgttccagataacgctaccgtagaagcgactgcagcaatcgatgcagaagcggatgactacaagattacagttctttatactccagtggaacaaaaagctgtagttaaattcgtagaagtagatcctactaatacagataaagtcattactccaggtcttgcagattcaatcgcagtaacaggtaaatctgaagctacttacccagctacaacagcaacttcagtaacagataagattgctgagctagttaagaaaggttacgaactagtaaataacggatttgtatcaacagataaattcgataaagatgctgcagttgatcaagaatatgttgtgaaattcaaagctaaagtagtagatgttccatcatttgatccaactaaaccatcaagtgacgacaatccaaaaccaactccaggtgtaacgccaatcgatccaaataatccagatggaccaaaatggaccgaagcattaatcaacgctgtaaaagtacaagaagaagtaacacgtactattaagtatgtatacgaagatggtactccagtagcagaatctgatttaacaagtgtggctgataagaaagttaaaacacttaaattcacacgttctggtaagattaatgtagcgacaggagaaatcacatacggagattggtcggctgatcaaacattcgaagcagtaacttctccaacacttgagaaatacactgcggcagttgcaggtgtaacaccaacagttgcagatgtgccagcgaaaactgtagcggctacagataaagactttgaagagacagtaatctactctacaaaaccaacaactgtagatcctaacaaaccaacagatccaacaaatccaaatgttactccacaacctgatgatgtagttcctaacgatccaaaaggacgtacatacagagaactaggtttagttgaagaagtaacacacacagttcactacaaacttgaagacggttcagatgcaggtatcgctgataatgtacaaacattaacatttacacgtaccgcagaggtagatccagtaacaggagcaatctctaactacggtacatggaaagctaaaggtggagatacaacaattgatgctgtaacaacaccaaataaagatggatacgtggcttcagcaaaaacatctacagaacgtacaaatgtatcagctacggataaagatagtgaagaaacaattatctaccgtaaacttggttcatatgtaccagtagtaccagaaggcatcacacctccggcagatgctgacctaaatccaaaaccatatccaaatgcaactccagcagatcctacaaaaccagggacacctactgaaactccagtagttccatacattcctggaacaacaccggtaggaccaaatggaaaaccattaacaccgaaagatcctaacgatccaagcaaaggatatgaagtaccagacttaccaacagatccaacagagaacactacaattacctatgttaaagatggatcacaagtagcgattgttcacttcatcgaagtaaacagtgaaacggataagactgaaaaaggtgcagttgcagaatcagtagtagatactggtgatacaggaaaagcattcactaaagctgcagatgtaacagcaacaattgaagcactaaaagctaaaggttatacagttgtagaaaacaactacccaacagatggtacattcgatgcagattctaagactaaccaagtatacaaagtcctagtaactgctaagccaattactgtaaatccaaacgacccaactccaactaaagatcaaccaatcgatccaaataatccaacaggaccaaaatggactccagagttaatcaaagagttagaagacggacgtaaagaggaagtgaaacgtacaatcaagtatgtttacgcagatggttcaaaggctgctgattcagtacaagaaactaaagagttcaaacgttcagcaactatcaatccagtaactggtaaggttacattcggagaatggtcaccagctcaaacatttgaagctgtaacttcaccaaaagttacaaacttcactccagataaagagactgtaccagcgacagaagtaacagcaactgctgaggatattactgaaacagtaatctatactaccaaaccagcaaatatcgatccaagtaagccagtagatccaaatactccaaatgttactcctaaacctgaagacaaagtaccaaacgatccaaaaggacgtacttacaaagaattaggattaatcgaagaagtaacacacacagttcactacaaactagctgacggatcagatgcaggtatccctgacaatgtacaaacattaacattcactcgtacagctgacttagatccagtaacaggagcaatctctaactttggtacatggacagctaaagacaatgatacaacaatcgacgctgtaacaactccaaacaaaccaggatatgtagcttcagcagctaaatctacagagcgtacagaggttaaagctactgataaagatagcgaagaaacaatcatctaccgcaaacttggttcatatgtgccagtaattccagaaggagtaacacctccagcggatgctgacttaacaccaaaaccatatgaagatccaaccagtgaagatcctacaaaaccaggaacacctactgaaactccagtagtaccatacatccctggaacaacaccagtaggtccaaacggtaaaccattaactccgaaagatcctaacgatccaacgaaaggatatgaagtaccgaaacagccagaagatccaactcaaaacactacaattacgtatgttaaagatggttctcaagtagctctagttcacttcattaaagaggatggtactgcagttcacgtatcagttgcggaagcaggagatacaggtaaagcaatcaagacaacaaacattgataacgttaaagctgaattagaagctaaaggttatgaagttgttgctccaactgatgcagcttatacagcagaacgtgtagcattctacgcagaagctaaccgtacatttgatgacaaggatgacaaaggtaatgatggaattagtcaagtttactatgtaatcgttaaagagggaatcaatccaatcgatccagataaaccgctagatccaaacaatccaaatacaactccaaaaccaggagacaaagtacctggagatccaaaacaacgtacatacgaacaactaggattactagatgaagtaaatcgtacaatcaactacagatatgcgaatactgataaagtagaagaagctaaacgtggtcaagaagctgcagctactgtagaacaaaaacttcgttactctcgtaaaggtgacctaaacaaagtaacaggtgaaatcacttatacttctgattggacagcaccacaaacattagcagaagtaacttctccagttatcgaaggatatgttgcggacattaaagcagctgaaaaagtagagaacgttgctcatgatgcagctgattcagtagtgaacgttgtttactcaccactaggtaaatatgtaccaaaagtaccagaaggattcgaagttccaaaagttgagaaacctcaatatccaaatgatccaacagatccaactaaaccaggaacaccaacaacagtgattcctcatgttccaggaacaactccaaaagatccaaatggaaatccactgaaaccagtagatccaaatgatccaagtaaaggatatgttccaccaacacctgaaaatccaacagaagatacgcaaatcacttatgagaaagatactcaaaaagcgaaagtaacttatgtggtagaaggaacaggaacagtacttcacacagataacctaaaaggtaaatctggagacccaatcgagtactcaacagtagctaaacttgctgaattgaaagctctaggatatgacttagtaagtgacggattcacaactgctacagataagaactacgataaagatacgaaagtagatcaaagctttgtagtaacagttaaaccacacgttgagccaatcaaaccagtagatccagaaaatccaaatgatccaaataaaccaaaaccgggtgatccaatcgatcctaagaaccctgatggaccaaaatggactgaagatctaatcaagaagattgatacaactcgccacgtgaaccgtacaattaagtatgttaacgaaaaaggtgaggaagtagctaagaaagtaactgataaagttacattcaatcgtgaagctaagatcaattcagtaacaggtgaaatcacttacggtaactggacagctaaagatggagatacaacattcgataaagttgaatcaccagtcgttaacggatacatcctgaaagatgccaaacaaaaagaagtagcagctacaacaggattaactgcagactctaaagatgaaaacatcgaagtagtttacactaaacttggttcatgggtaccgaaagtaccagaaggtgaaacaccaattgatccacttccatatccaaatgatccgaacgatccaactaaaccaggaaacgatagaccaatcgttccttacgtaccaggaactacaccaaaagatccaaatggaaacccactgaaaccagtagatccaaacgatccaagtaaaggatatgttccaccaacacctgaaaccccaacagaagatactgaaatcacttatgagaaagatactcagaaagcaaaagtaacttatgtggtagaaggaactggaacagtacttcacacagataacctagaaggtaaatctggagaaccaatcgactacagtacagtagctaaacttgctgaattgaaagctctaggatatgacttagtgagtgacggattcacaactgctacagataagaactacgataaagatacgaaagtagatcaaagcttcgtagttacagttaaaccacacgttgagccaatcaaaccagtagatccagaaaatccaaatgatccaaataaaccaaaaccaggtgaaccaatcgatcctaagaaccctgatggaccaaaatggactgaagatctaatcaagaagattgatacaactcgccacgtgaaccgtacaatcacatacgttaacgaaaaaggtgaggaagtggctaagaaagtaacagataaagttacattcactcgtgaagctaagattaactctgtaacaggtgagatcacatacggtaactggacagctaaagatggagatacaacattcgataaagttgaatcaccagtcgttaaaggctacatcctgaaagatgccaaacaaaaagaagtagcagctacaacaggattaactgcagactctaaagatgaaaatatcgaagttgtctacactaaacttggttcatggattccaaaagtaccagaaggttctacaccagttcctccggttacgtatccaaacgatccaaaagatccaactaaacctggaactgataaacctaaagtgccttatatcccaggaactacaccggtggtgccaaaagatccaactaaaccaattagtccggataacccactagttccattaacaccagtagatccaaacgatccaactaaaggatatgaagtaccaccagtaccaacagatccaggaactgatacgccaatcacttacgtaactgataaacaaaaagctatcactaacttcgtagatagaaaaaggtaaagtagtatcaactccagtaattgatgaaggtgattcaggagctaacttcactaagtctaaagttgatgaagtaactaagactattgaaaaatttgaaaaagctggttatagagtcgttaagaacgagttcccatctaaagatacagatagagtatttgataaagataaatctgtagatcaaatcttcactgtaacagtagctgaaagaattattccagttacaccaggtaaaccaatagatccaactgatccaaacttaccgaagaatccagatggaacacctgtgacaccatctacaccagaaccaggtaaaccagtattccctaacgatccaaacagcccagtatggccaaatactgtgaaagatcttgtaactgagaaatcagctacacgtacgatcaagtatgtagatcgcaacggaaaagaagtttctgaaactcgtgttgaaacaatcaagttcactcgtgaagcaaaagttaacttagtaactggtgaaattacatatggtgagtggacaacagatcgtaacgatgatatcttcaacggttaccaagtaccagttgtgaaaggatacatcgctaaagctggtgatctagaatcatcaactaaagatgtacaagtaactcctgatacaatcaaggatatcaatgaaacagtgatttacgataagttaggttcatggattccaaatatcccaggaacaccaacaaatccaatcacatatccaaacgatcctaaagatccaactaaaccaggaacagataaacctaaagtaccttatgtaccaggatttatccctgtagacccagaaggtcaaccattgaaaccagttgatccaaaggatccaacgaaaggatacgaagtaccagaggtacctggtgatccaacgcaagatacaccaatcaactacattcctaaggatcctacaccaaatccaactccatacccaggtccaactccagctccaactcctaaaccagagcctaagccggaaccaaaacctgagccaaaaccagaaccagaaactccacaacctgtaacacctgcagataatggagataacaatggaaataataatggaactccaacaactccagctcaaccagtagcgccttctacacctcaatacatggatggtcaacgtgaacttccaaatacaggtacagaagatcatgctagccttgcagcacttggacttctaggagccctaagtggatttggattgattgctcgtaagaaaagagaagatgaagaataatcattttgattttcattaaatgctaacttgcaaaaagataaagaaagaacttgagatttactatctcaggttcttttctttctctttttgaaaatggtataatatagtgagaacgatagaggagaagtgtaaattgatcgcacaactagatacaaaaacagtctatagttttatggagagtgtcatttcaatcgacaagtatgtgagagcagctaaagaattcggctacactcatctggctatgatggatattgacaatctttatggggctttcgactttctagaggttacaaaaaaatacggcattcatcctttgttagggcttgaaatgaatgtgattgtagatgataaggatgtgaatctgcgctttttagctttatctagtgtgggctatcagcagttgatgaaactttcaacagccaagatgcagggggagaaaagttggtcagttctatctcagtatctagaggatattgtggtaattgtgccttattttgaagagcttgagttgttaaatctaggctgtgattactatataggggtttacccagaaacactggccagcgaatttcaccatcctattttaccattgtatcgggtcaatacatttgaaagtaaggatagagaagttcttcaagtattaacagcgattaaagaaaatctaccgctcagagaagtccctttgcgttcgaaacaagatgtttttatatcagcaagttctttagagaaactattccaagaacgttttccgcaagccttggacaatttagaaaagcttatttcaggcatctcttatgacttggatactagtctgaaattgcctcgctttaatccagctagaccagcagtagaagagttgagagaacgtgctgaattggggcttgctcagaaggggttaactggtaaagaatatcaagaccgtctagaccaagaattggctgttattcatgatatgggctttgatgattatttcttggttgtctgggatttgttgcgttttggacgttcgaatggctattatatgggaatgggacgaggttccgcagttggtagcttggtttcctatgctttagacattacagggattgacccagtagagaaaaatctgatttttgaacgtttcctcaatcgtgaacgctatactatgcctgatattgatattgatatcccagatatttatcgtccagattttatcagatatgttggtaataaatacggcagtaaacatgcggctcaaatcgttactttttcaacctttggtgctaaacaagctttgcgagatgtcttgaagcgctttggtgttccagagtatgaattatctgcaattaccaagaaaatcagttttcgtgataatctcaagtcggcctatgagggtaacctccagtttcgtcagcaaatcaatagtaagttagaataccaaaaagcttttgaaattgcctgcaagattgagggatatccaagacaaacctctgtccatgcggctggtgttgtgatcagtgaccaagatttgactaactacatccctctaaagcatggtgacgaaattccactgactcagtatgatgctcatggagttgaagcaagtggacttttgaaaatggattttctggggctacgaaatttgacctttgtccagaagatgcaagaattgcttgctgaaacagaagatattcacttgaaaattgaagaaatcgatttggaagataaagaaacgctagctctttttgcttctggcaatacaaaaggtatctttcaatttgagcaacctggtgccattcggctacttaagcgtgttcaaccagtctgttttgaagatgtagtagcaactacttccctaaatcgaccaggtgctagtgattatatcaataattttgtagctagaaagcatgggcaggaagaagtgacggttctggatccagtgctggaggatattttggctccaacttatggcattatgctctatcaggaacaggttatgcaggttgctcagcgatttgctggatttagtcttgggaaggctgatattttgcgtcgagctatgggtaaaaaggatgccactgccatgcatgagatgagggcttcctttattcaaggctccatagaagctggtcatactgcggaaaaagcagagcaggtttttgatgttatggagaagtttgcaggttatggatttaatagatctcacgcctatgcctactcagccttggccttccagttggcttattttaaaacacattatccagctatcttttatcagattatgttgaattctgccaacagtgattatgtaacagatgccttggaagcaggttttgaagtagccccattgtccattaatactattccctatcacgataaaattgcgaacaagtctatctatctaggtttgaaatcgattaaggggctcagcaaggatttggctatttggattattgaacatagaccttattctaatattgaagattttttagctaaactacctgagaattatttgaaacttcccttgctggaacctttggtaaaagttggtcttttcgattcatttgaaaaaaatcgtaaaaaagtattcaataatttagttaatctatttgaatttgtgaaagtattaggaagcttatttggagagactatctatagttggcaagattcggaggactggacggagcaagaaaaattctacatggaacaagagctcctaggagtaggcgtcagcaaacatcctctacaagctattgcaagtaaggctatttatccgattactcctattagtaatttgtcagaaaatagctatgctattatcttggttgaagttcagaagataaaagtaattcgtaccaaaaaaggtgaaaatatggctttcttacaggtggatgacagtaagaaaaaattggatgttaccctcttttcagatttatatcgacaggttgctcaggaagtaagagaaggagccttctactatattaaagggaaagtccagtcacgtgacggtcgtctgcaaatgattgcacaagaaataagagaagcagtggctgagcgcttttggattcaggtgaaaaatcatgactcggatcaagaaatgtcacgtattttagaccagtataaaggcccaatcccagtcattatcaggtatgaagaggaacagagaacaattgtttctccccatcattttgtagctaaatctgatgaattagaagcgaaattgaatggaatagttatgaaaacgatttatcgctaaaattacggaaaatagaagaattttcaacgtaaatgtggtataatcagtaagaatgttaaaagaaaaaggagcataaccaatatgaaacgtattgctgttttgactagtggtggagacgcccctggtatgaacgctgccatccgcgcagttgttcgtcaagcaatttcagaaggaatggaagtgtttggtatctatgatggatatgctggtatggttgccggtgaaattcatcccctagatgcagcttcagtaggggacatcatttctcgtggtggtactttccttcactcagctcgctacccagagttcgctcaacttgaagggcaacttaaagggattgagcaattgaaaaaacacgggattgaaggtgtagttgttattggtggtgacggatcttaccacggtgctatgcgtttgactgaacatggcttcccagctatcggtcttccaggtacaatcgataacgatatcgttggtactgactttacaatcggttttgacacagcggttacgactgctatggacgctatcgataagattcgtgatacgtcatcaagtcaccgtcgtacttttgttatcgaagttatgggacgtaacgcaggtgatatcgctctttgggcaggtatcgcaactggtgctgatgaaatcatcattcctgaagaaggcttcaagattgaagatatcgtagaaagcattaaatgtggttatgagtgtggtaaaaaacacaacatcatcgtcttggcagaaggtgttatgtcagcagctgaatttggtcaaaaactaaaagaagctggggatacaagcgaccttcgtgtgacagaacttggacatattcaacgtggtggttctccaactgcgcgtgaccgtgttttggcatcacgtatgggtgcacatgctgttaaacttcttaaagaaggtatcggtggtgttgcggttggtatccgtaacgagaaaatggttgaaaaccctattcttggaactgcagaagaaggagcattgtttagccttactgcagatggtaagattgtggttaacaacccacacaaggctgaccttgagctatctagcttgaataagagcttgtcataatttataatttagttaataagaccaaaaaggtcatatataaaggagtcacaaaaatcatgaataaacgtgtaaaaatcgttgcaactttgggacctgcggtagaaatccgtggtggtaaaaaatttggtgatgacggatactggggtgaaaaacttgatgttgaagcttcagctaaaaacattgccaaattgattgaagctggtgctaacacattccgtttcaacttctcacacggtgaccaccaagaacaaggtgagcgtatggcaactgttaaacttgcagaaaaacttgcagg

SEQ ID NO: 62 - DNA, 111153 bp, Streptococcus mitis NCTC 12261 contig8
ctagtttttgatttcttctattttaccacattttgccgtttaaagcttaagaaaattatgatatactagaatgtagcaaaaatttagaaatggacgtgaagcaagaaacatggcacagttgtactatcgttatgggaccatgaactctggtaagacaatcgagattcttaaagtagcctataactatgaggagcaaggaaaaggtgttgtgattatgacctcagctcttgatacgcgtgacggtgttggctatgtgtcgagtcgaatcggtatgaaacgccctgccattgcgattgaggaaacaactgatatcttcggttatatccgagatttaccagaaaaaccttactgtgtgttggttgatgaagcccagtttctcaagcgtcatcatgtttatgacctagctcgtgttgttgatgagttagatatacccgtcatggcttttggtttgaagaatgactttcgcaatgagttgttcgaaggttcaaaatacctcttgctcttagcagacaagattgaagaaatcaagaccatctgtcagtactgtaagaaaaaggcgactatggtgttgcgaactcaagatggtgtgccagtctatgatggcgaacaaattcagatcggtggaaatgaaacctatatctcagtttgccgtaaacattattttgcccctgaaatcaataaggagaatgaagaaaaatgaacatctatgatcaactacaagctgtagaagaccgttatgaagaattaggagagttgctcagtgacccagatgtggtttcggacaccaagcgtttcatggagctttcaaaagaagaggcttctactcgtgatacggtaactgcctaccgtgagtacaaacaagtccttcaaaacatcgttgatgcagaagagatgattaaagaatctggcggggatgcggacttggaagaaatggccaagcaagagctcaaagatgccaaggctgaaaaagaagaatacgaagaaaaactcaaaattttgctccttccaaaggatccaaacgatgacaagaacatcattcttgaaatccgtggcgccgctggtggagacgaagcagcacttttcgctggagatttgctaaccatgtaccaaaagtatgctgaagctcaaggctggcgctttgaagtcatggaggcttctatgaatggtgtcggtggtttcaaagaagtggttgccatggtttcggggcaatctgtttactctaaactcaagtacgaatctggtgctcatcgtgtgcaacgtgttcctgtgacagaaagccaaggccgtgttcatacttcgacagcaacagttcttgtcatgcctgaagtcgaagaagtagaatacgatattgatccaaaagaccttcgtgtcgacatctatcacgcctctggtgctgggggacagaacgtcaataaggttgcgacagcagttcgtatcgttcacttgccaaccaatatcaaggttgagatgcaggaagaacgtacccagcagaagaaccgtgagaaggccatgaaaatcatccgtgcgcgtgttgctgaccactttgcacaaattgctcaggatgaacaagacgctgagcgtaagtctactatcggtactggtgaccgttcagaacggattcgtacttacaatttcccacaaaatcgtgtcacagatcaccgtatcggcttgaccctccaaaaactagataccattttgtctggtaaattggatgaagttgtggatgccttggttctttatgaccaaacgcaaaaattagaagaattaaacaaataatgaaattagctcaattattttcagattttgaagaagaattgataagacaaggagaggaagcagaaagcctctcttttgtctatcgtagcctgaaaaatctatcttttacggactttgtttttgccctccagcaggaagtgactgaagaggaagaagtatttgtaaaagaaattttccaacagttagcaactcataaaccggcacagtacatcattggacaggcagatttttatggaatgcagttaaaagttgatgagcgagtattgatccctcgtccagaaacagaggagttggtggagcttatcctggctgaaaatcctgagacgaatttttcagttctggatatcggaacaggtagtggagccattgcccttgcattagcaaaaaacagatcagcttggtcggtgacggcagcagatatttcccaagaggctcttaaccttgcgtccgagaatgctaaaaatcaaaaacttaatatatttttcaaaaaatctgattgttttgcagaaatttctgaaaaatatgatataattgtatccaatccaccctatatctctcgtgaagatgagtcagaggttggcttgaatgtcttgcattcggaacctcatctagctctttttgcagacgaggatggcctagctatttaccgtagaattgcggaagatgcaacagactatctcaaagatggtggtaagatttaccttgaaattggatacaagcaaggtcaaagtgttcctgaactttttaggaaacatcttcctgaaaaacgattacgaacacttaaggaccagtttggtcaagataggatggttgtaattgatgatggacaggattagacaagagttggaaaatggtggagcggtcgttctacctactgagacagtttacggtctctttgccaaggctctagacgaaaaagcagttgaccatgtttaccaactcaaacgtcgtccaagagataaggcgcttaacctcaatatcgcctctctagaggacatcttgcacttttctaagaatcagccaacttatctacaaaaacttgtagagacctttttaccaggtcccttaaccattattctcgaagctaatgaccgagttccctattgggtcaattctggtcttgcaactgttggatttcggatgcctagtcatcccattacccttgatttgattcgagagacaggacctctgattggaccgtcagctaatatctcaggtcaggcaagtggagtgactttttaatcaaattctagaggattttgaccaagaggttttgggtttggaagacgatccttttctaactggacaggattcaactattttggatttgtctggagacaaggtgaaaatcttacgccaaggggccattaagcgagaagatattcttgctcggttgccagagatttcttttgaggaggaatgagatgttaagagacttaagagaaactgatgtgaaagcaatatgtgagatcaaccaagatgctttgggctattcttttagtccagaggaaacggctagtcaattagctagactatctcaggattcccatcatttcttacttgcttatgaggatgaatctactcatgccttgcttggatatgtccacgctgaggtctatgaatcactttattctaaagcaggatttaatattttagctttagcagtttcacctcaagcacaagggcaaggtattggtaaaagcttattacaagggttggatcaagaagcaaaaagacgtggttatgggtttatccgcttaaactctgccgatcatcgtctgggtgctcatgcattttatgaaaaagttggttatacttgtgataaagtgcagaaacgatttattcgcatcttttagtttattttcttgttgcaaaacaaactaaaggaccagtcacactataaaggagaagacctatgatttttgacaaagacgattttaaagcatatgatgctgatctctggaatgctattgccaaagaagaggaacgccaacaaaacaacattgagttgattgcttcggaaaacgtagtttccaaggcagttatggcagctcaagggtctatcttgacgaataaatacgctgaaggttacccaggacgccgttattatggtggaacagatgtagtagacgtggtggaatctctagccattgaacgcgcaaaagaaattttcggtgcaaaatttgccaatgtccaaccacactcaggaagccaagctaactgtgcagcttacatggccttgattgagcctggcgatacggttatgggaatggatttggctgcaggtggtcacttgactcatggggctcctgttagcttctcaggtcaaacctacaactttgtttcttatagtgttgatcctgaaacggaactcttggattttgatgctatcttgaaacaagcccaagaagtaaaaccaaaattgatcgtagcaggtgcttcagcctattctcaaattatcgacttctcaaaattccgtgaaatcgcagatgctgttggggctaagcttatggtggatatggcccatatcgctggtttggttgcagctggttttcacccaagcccagtgccatacgctcatatcactacaacaacgacccacaaaactcttcgtggcccacgtggtggtttgattttgaccaatgatgaagacttagctaagaaaattaattcagctattttcccaggtattcagggtggtcctttggagcatgttgtggcagctaaggctgtttctttcaaagaagttttggatccagccttcaaggaatatgctgccaatgttatcaagaacagcaagactatggcagatgtcttcttgcaagaccctgattttcgtatcatttctggaggaactgaaaaccacctcttcctagtggatgtgactaaagttgtagaaaacggcaaagttgctcaaaacttgctggatgaagtcaatattaccctaaataaaaactcaatcccttasgaaagcttgtcaccattcaagacaagtggtattcgtatcggagcagcagccattactgctcggagctccctcaccaagaaagtcgcaaagtgaaagaacttattttataaacctttaagaatgcagaaaatgaagctgtctaaaaagaaaaaagaagtgcggttaaagaattaacagatgccttcccattatacgaggactaaaacttttatggacatttatattaagaaagctattctttcatcagttcagtccggatgacaccgacctgttcctagcggataagtttctcaatattactccaaaaatcgaagaatacttgcgtaaaaaaattgaacgtgtgtattcagatgaagccaagtctgggattttcgaggaagaaaatcccttcttcaatcatattacagacgatttgttggagacatcagtaacgctggctaatctctggaaagaggagttcagcatttccgaaaatctcaagaccaatgacttgatttttgtgcaattttctaaagaaggtgtagaacatttcgctttcttgagaattgccctgagggagaccttgacccaccttggtggagaagttgataatccaatcaagctaactcagaataacttgcctggatttggaacgagtgccgacgaagccttggtggttaatcttcagagtcgcaagtaccacctgatcgagaaacgaattaagtacaatggaacttttttgaactacttttcagacaatcttcttgctgtcgctcctaagatttctcctaagaaatctatcaaagaactggaaaagacagcccagagaattgccgaatcttttaatacagatgattttcaatttcaatctaaagtaaaatcagcgattttcaacaacttagaagaaagcaatgaactgtcgccagagaaattggccaacgacctttttgacaataatctgacggctcgtttgagctttattgatcaagtcaaggaagccgtaccagagcctgttcaatttgatgaaattgatgccagtcgtcagcttaaaaaatttgaaaaccaaaaactttccttgtcaaatggaattgagcttatcgttcccaataacgtctatcaagacgccgagtctgttgagtttatccaaaacgacaatggaacctactctatcttaatcaaaaatatcgaggatatccaaagtaaataatgtttwaacgaattcgaagagtgcttgtactagcagtcttcctttttgctggatataaagcttaccgcgttcaccaagatgtcaagcaagtcatgacctatcaacccatggtgcgagaaatcttgagtgaaagagacaccccagcaaacgaagagcttgtgctcgctatgatttataccgaaacaaaaggaaaagaaggcgatgttatgcagtctagtgagtctgctagtggcgctaccaataccatcaatgataatgcctctagcattcggcaaggcgttcaaactctgacagacaatctctatctggcccagaagaagggggtagatgtctggacggctgttcaagcctacaattttggacctgcctatatagattttatcgcccaaaatggcaaggaaaacaccttagctctggccaaacagtactctcgtgatactgttgctcccttgcttggtaataccactggaaagacttatagttatattcaccccatttccgtttttcacggtgccgaactctatgtaaatggaggaaactattattattctagacaggtgcaacttaacctttacattatcaaatgtttcactctcttttcgacatctggttagtccagatgtttttgttataagttttctttaagatagatatattactctagaaaggtaaaggaggaaattccctatgagaaagaaactctttctgtccagtgttgcggtcttgtgggcagtaacagctatgaatagtgtccatgcagcaacagatgttcaaaaagttatcgatgaaacctacgtccaacctgaatatgtcctaggttcatcattgtctgaagaccaaaaaaatcaaacccttaaaaaactaggctacaatgcctcaacagacaccaaagaactcaagaccatgacacctgatgtctattctaagattatgaatgtggccaatgaccctagcttacaattgtattcatcagccaagattcaaaagctaggggacaaatcgccacttgaggtcaagattgaaacacctgaaaacatcactaaggtaactcaggatatgtaccgaaatgcagccgtaactttgggtgtggaacacgccaaaatcactgtagcagcccccattccagttacaggagaaagtgctttagcagggatttattattcgctagaggctaatggagccaaggtaccgcaagccaataaagatttggctcaagaagagttgaaggctttgtcagatatcaatgctgaaaacaaggacaaaactggctatgatgctaataaattaaacgttgccctagccgatatcaagtcaggactcgccaaagctaaagaaagcaagggaaatctgacagaggaagatgttcgtaaaattgttgaagataccttgaaaaattacaaacttgatcaggttataacaggaaaccagatcaatatcatcatcaattttgctttgaatctctcaaagagtgatatcctcagcaatacagacttcactaaaaccttgaatgacctgaaacaaagtattgtttcacaagctggcgacagttttaaaaatatcaaccttaactttgatgctgataaggcgctagaggacggtggtaacttcttaagctccctctggcaagccattgtcaacttcttcaagagttttggttcttaagaaatttcatggtataatagatggtaaccgtaacgttgccgtcttttttgtcggccaatagaaagatgaagagaatgttaaagaaaaatgatattgtagaagttgaaattgttgacttgacccatgaaggggcaggagttgccaaggtagatggcttggtattttttgttgagaatgcattaccgagtgaaaaaattctcatgcgagttctcaaggttaataaaaagattggttttgggaaagtggaagaataccttgtccagtcaccacatcgtaatcaagatctagatttggcttacttgcgttcaggaatcgcggatttaggtcatcttgcctatccagaacaactcaaatttaaaaccaagcaagtcaaagacagtctctacaagattgctggaattgatgatatagaggttgctgaaactttgggtatgaaaaatccagtcaagtaccgcaataaggcgcaggtgcctgttcgtcgagtgaatggtgtcttggaaacaggatttttccgtaagaattcccacgatctcatgcctttggaagatttctttatccaggatcctgtgattgatgaggtagtagtagccctacgagacttgctccgtcgttatgatttgaaaccttatgatgaaaaggaacaagctggcttgattcgaaaccttgtggtgcgtcgtgggcactattcaggacaaatcatggttattttggttacaactcgtcccaaagtttttcgtgttgaccaattaattgaacaattaatcaagcagttcccagacatcacgtctgttatgcaaaatgtcaacgaccaaaacaccaatgcgatttttggcaaggaatggcgtacgctttatggtcaagactatattaccgaccaaatgttgggaactaactaccaaatcgctggaccagcattttaccaagtcaatactgaaatggcagagaagctctaccaaacagctattgactttgctgaattaaaagaagatgatgtggttatcgatgcttattctggtattggaacaattggcctctctgttgcgaaacatgtcaaggaggtctatggtgttgaagtaattccagaagcggttgagaatagcaagaagaatgcccaattaaacaatatttcaaacgcccactatgtctgtgatacagccgaaaatgccatgaaaaattggcttaaagatggaattcaaccaagccttatcctagtggacccaccaagaaaaggactcacagaaagctttatcaaggcaagtagccaaacaggagctgaccgcatcgcctatatctcttgtaatgtcgcaaccatggcgcgtgatatcaaactctaccgagaattgggatacgagttgaataaagtacagccggttgatctttttcctcaaacgcatcatgtggaggcggtatcactgcttgtacgagttgaagcatcagcgaggtaaaagtagatgttcagccaatgcgacgaggtaggaccaaaggtcgataaggtgtgttctgggtataggactctttaaagtaagtaggaaatatgatgagatgatacagagagcctgaattggtcaggtgacgtgcttatttacattagactgataatgaaaatggagagattatcgatggttatattggaattgtaccaaaatgattattctaaagatttagttgcgtttgattccatagaagatgggaaagcctttgtagctcaaatcccgggatacactctggaaacagaagatggttttgaagtggagtattttaatcctaaaaacataccggattatatggaaattatttttaacgggaatattgttcctttatctaaatttatgttcggtcctgaggaaaatgtagacattatttggaaagagatttcaaatttatccctcaaaaacgatagagtgatcgaaggatattcaaaaatcgatgcatatgttgttaacaacgatgaagttaaagcctatgtcgaagcgagagaagtgaactatcgccaggcaaaagactttctagaaggcagtggatatgaagtagacagaagctttttcggaagtgaagacggcgaagcgattctctacagaaaaaaaggtgccgaagattggcatttcttgtgtcacttagacccaatgtttgtagagattgaagatgtagaaggatatgttaaagaagagatgggagagattcaatagtcaaccaaagttccttgtgagtatgtacctttgctagtaaaagcgtcaaaacgttgtaacgaaagagattatgaaaatctttgaagttaagactttttcttgtgtgtctgaaaagtctgtgacttgtattccttagtcaccttatttacaattacctaaattctatagttaataaaaattgagaggtttgtatgtggactcaacgtaaacagtatttaacccaatttatcgaaatttcggactatttgaaaaaacacggtttctttcacgattttttaattggatcattctcttatgatagtcaggaaaaatccattttgttaaccattgaggaagattttactacaactaataataccaattcgccttcccttatttgggatttaaagtgtaagggagtgcatgatttcttaatggaagatatggatggcctttccaagtggtggatctctgaaatactgatggacgacgatgatattcagtttcaactcgtcaatggatatttttcatttaaaatggaatctgtatctttaggtattcctcaggaaataaatcaaaattctgtccctaaagtttcttctttacatattgactaccttattcaagagtttagagcgggtatgaatgttgatgaaacttcattttcttttgagaaggataatcaggattttatatgctatattggttattcagaaaatgagctcttgccatattgggcgggtctatgtgacttacctgatggtagaagatttcgaacagctgatgaactttttgaagcaaggatttatgatggtaaatcgctaaaagagaggtgggatgaagttactatttatagtatcaattctttgccacttgatgattggttgagttgttagccacattccgttgagacaactgtttatgaaccagaggatgattacgctctgtatgttaatggtgttaaacttgagggttttattgatgaagattctatatgtaagacatgtggtgctaatcaatgttatttggacgattatgatgaatatttttgcccctattgtaatttatggatgtataaagatttttgggatagtgatgaaacacactattttaaaaaaagacccctagaaccagagttgttatggaaaccaagtaaagaattgaatttttgtaatgttcgattctttccgaatgacaaagaatatgtgtattattgtcctgatgagtcaatagagaaatttgattggatagaagttcctgttgggaacaaatctcatttaaaagaagcacaagttactgaagttttcaagagacaagccaataaaccgccatttcytcttgaaaaaataaaaaaagtagaacgaaaactatctactataaacaaaaaaattttagaaactcaaaatagtctattaagtgaaggagttatctgcgatttatcagaagctaaaaatatagtaaactcaaagcaagcttatgatatcctaaaaacgccaatcggaaacttttggttagagcttaatggttcccccataaaaatttccattggcgcacattatccaaataatgatgaagaatactatgtggaagcttcttattacataaaacctctcaatccagattttgaaaagtttaaatcgttgacaatctgctcagatattgatttaagaagttcaagattaatagataatttaggtggtgagcataaagagggttataattggcaagtctataatattgatttaggtattgtggctcatccatattcttatctagaacaggaagtctctgaaactcccgttggacttccatattatgtagaatggattgaaaaatataaagaactctatggatttacagttgcttggaagtattttgtatctgatgacgatttgtcagtttggtttaatacataaaattttcatataattttaatagataaattaggagtaatttagcattatatctaaaagtaaaatttattccactaaaagttgattgacgacttttaaacaatttatcctagcatagttaggaatggagagataagatgatatggactaaggaatatttttctaaaattgaatttattattcattgtggttgtgaaatttttggttattttgagtgtaatctgatgaactctgaactatcctaccaagagtgtgggaatactggaatgatcgtttttgaacatagtcagaaactatccgaaaaagccttatctaaacttatgaaatatacgctacttattgattttgagaaatatagaaaggggaataattcaaataagaatgataaagttattggttatagagatgccttttcgataactttcaagggctatagtcaagatggacaagctttattgatatataatatggactatgtttacaaggattggtacaatagacccgttgatagcttatatagttttataagcgatacctatttttcagattttcaaaataatagatgttttattgctcaagggctgatggctggtgtacttccgttttaggtataataggaagatgtagtacataatggaatcaaaaaagttatttaattataatttgattagatgaatacctataaattataaaaaattcgttaatagataatttaaaaactatagttgatggtcaaattcccgatatcttacaaggaggaaacggatgctaggagcaatagttggagatattgtaggttcagtttactaatggaacaatatcaaaacgaagatttttctttatttcgtgaggattgtttttttacggatgatatggtaagtccgaatcgctgagtgtgtgattgtgatctggtgtcctaagtatgaaaaatggcaaacagtaaagtactcttttaaggtgaaaacctaaactggttttaaggaggtgttatattgatagagagcagacctgagtttgataaaatcgtatcatttgatgagtttaataaatattattggtatcgtgatgaactttcacaactatgtaagtcattaggattagaatatagaggtactaaacaagaactcaatcatattattgagcagtactttcaggggaattttattaaaaaatcatcaataaaaaataaaaagaaacgagtagaagtcgttaccttggacacacccttgcttgaatgtggattctcctttaatgcacactttagagaatatttctcaactttaacagatgtttcgccatttaaatttactgctgatatggctacagcttggagaaaagtaaaaagagaaaatgatttgagttttacaatccaagatatgctaaaagtctattatggaaattcagattatgccaagtatgatcattcggtttgtcaatggaatcaatttttaaaggatttctgtgtagacgaaaatagtcgtaactactcaaacaagttaaaagtagcttctattctttggaaagaagttagaaattcaaaagctgaaaaaatttattcaaagaatcttttgactgaatatgctgataaaataaaagagtatgggaagtagaaaaatcagtctaaaccaatagttcacgaggaggaatcttatgctaggagcaattatcggagatattatcggttctgtttacgaatggaacaatatcaaaacgaaggactttcctttatttcggaaggattgcttttttacagatgacacggttatgacctgtgctgttgcagaggcgattatgaatgggggacaaaaagacgacttcattgatgctatgaagaaatatggtagaatgtatcctgatgctgattatggtgctcggtttaatgcatggctaaacagcgataaccgtgagccttataatagctttgggaatggttcggctatgcgtgtttctccatgtgcttggacaatggactgtggtttttgtgcgagaaccggaatgtggccatcatctagggaatttgcgagtctttctgcagaggtaactcataatcatccagaaggtatcaaaggtgcaatggctacagctgatgctatctttctgtgtcgttattactttggaggttattgcggagattatgagcaaccaatcaatgacaatcctacaaagtgtaaaagacggattaaggattatattgagcaggaatacggctacaatctatctcaaactttagatgaaatccgccctacataccgtttcaatgaaacgtgccaggataccgtaccacaggccattattgcatttctagaaagtagagacttcgaagatgcgataagaaatgccatctcacttggtggcgacagtgatactctcgctgcaattactggtagcatagccgaggcggcatacggtattcctgactggataaaggataaggccttttcttacttggatgaatccttaaaggatgtagttatacgatgggaaaatagaataaaagcgtattaatctccagtacgtcagatttctcttttctgtattttcgtagtataatagggatacgtttagtttcatataatgagatatatatttttaacgaatattaaggagaacattaatgaaaaaagcaatggtaattatcaaccctacttctggtggcgaaaaggctttggattacaaagaaaagctggagaataaagcaaaagaatactttgagcacgtggaaaccaaaattaccgaaaaggcgctggatgcaacacattttgctgaagaagcttctcgtgagcagtacgatgcagtggttgtgtttggtggagatgggactgtcaacgaagtcatttcgggtattgctgagagagactacattcctaagttgggtattatcccaggcggtacgggtaacctcattacgaaactgttggaaatcaatcaagacatcgatggcgcgatagatgaactggattttgatttaaccaataagattgatatcggaaaagcgaatgacaattattttggttatatctttagtatcggttctctacctgaggcgattcacaatgttgaaatcgaggacaaaacaaaattcggtattttagcctatgctgtaaataccatgaagtctgtcatgacagatcaggtctttaacattaaggttgagacagaaaatggaaattatgttggtgaagctagccatgtgttggttctcttgacaaattacttcgctgataaaaaaatctttgaagaaaacaaagatggctatgctaatattttgattctgaaggatgcttctatattctccaaattatccgttattcctgatttactaaaaggggatgttgtcgcaaatgataatatcgagtatatcaaagctcgtaatattaaaatttcttctgatagtgaattggagtcagatgttgacggtgataagtcagataacctacctgtagaaatcaaagtcctagctcagcgagtagaagtattttcaaaaccgaaagagtagaaggtaaaaattagtttattattcacaacgaaattaagtcctatatcaacgattggaggaggaatgaattctctatttgatgaatttcgaataatttgttctcatttaaaccaaatcggaatcactccgacgctcatggggtctttggggtttgaataccgttcaaatgaagaatggaggccgtctgacattgacattcatgtgcctggtgatcctagaggttgggaagcgcctgatcatctcagaatttatgagtgggacaagataatgaaagtgatgaaacacttaggctatgacttaatagatattcatgagcatgaattcaaaaaagatggactgagtgttgaattcggaagtatcgattctttacctgattttgcaggagtttcggaatcggatatagagctgattcatctcgaaaacatcacttttcgcgttccaagtttggaacagtttttaagtatttacaaggcttcttcccaagattcctatcgaaatgatcacaataacaataaggattttaaaaaaatagagtggttgcaaagatattttttaatcatcatttgaaaagtagcaagttgtaagactggctgcttttttatttatagaaccaaaccactagaatctacggataagccttgaaaataaaatacgaaagtagtatactagaatcacaattatgaaaacgtttgcgtaaaattggaattaaaactttaggagacaaattgatggaattaagtgctatttaccataggactgagtcggagtatgcctatctttataaggataagaagattcatattcggattcgaactaagaaaggggatattgaaagcatcaacttgcattatggggatacttttatctttatggaggagttttatcaggatacaaaagaaatgtccaagataacttctgatggcttatttgattattggcaggttgaagtgtccgttgactttgcacgtatccagtatctctttgaagtcacggatacagaaggtcaaagtattttgtatggtgataaagggtgtgtggacaattctctagaaaatcttcatgctattggaaatggatttaagttgccctatcttcatgagattgatgcctgcaaggttcctgattgggtttcaaatacggtatggtatcagatatttcctgagagatttgccaatggaaatgctcgattaaacccagaaggaacattagactgggattcatcaagcacacctaaaagtgatgatttctttggtggtgatttacaggggattattgaccatctggattatttgcaagacttggggattactggactttatctttgtcctatatttgaatccacgagcaatcataagtacaatacgacggattattttgaaattgaccgtcattttggagacaaggagaccttccgggagctggtcgagcaagctcatcagcgtggcatgaaaatcatgctggatgcggtatttaaccatattggttcgcaatctcctcaatggcaagatgttgtcgaaaatggtgagcaatctgcttataaggattggttccatattcaacaattcccagtgacaactgaaaagctagttaataagagagacttaccttatcatgcttttggtttcgaggactatatgcctaaactaaatacagccaatccagaggtcaaggactatcttttaaaggttgcgacttattggattgaagagtttgatatcgatgcttggcgtttggatgtggctaatgagattgaccatcagttctggaaggattttcgtaatgcagttttagctaaaaagcctgatctttatatcctaggagaagtctggcatacgtctcagccttggttaaatggagatgagttccatgcggtcatgaattatcctttatctgatagtatcaaggactatttcttacgaggaattaagaagattgatcagttcatcgatgaaatcaatggtcagtctatgtattacaaacagcagatttcagaggttatgtttaatctcttggattcgcatgatacagaacgaatcttgtggacggcaaatgaagatgctcaactggttaaatcagccctagcctttctctttttacaaaagggaacaccctgcatttattacggaaccgagttagctttaaccggaggaccagacccagattgtcgacgttgtatgccttgggaacgtgtatcaagtgacaatgatatgctgaatttcatgaagaaattgatccagattcgcaaacatgcgtcagcaaccattcagcatggcaagtatagcctaaaagaaattaaagctgatgtagtagccttggaatggaaatacgaaggccggttccttaaagcaatctttaaccaatcaaaagaagactatattatagagaaagaagcagtatcactagcaagcaattgccaagaattagagaatcagcttgtgatttatccaaatgggtttgtgatttttcattaaagaacaattatgagcgacaggaaagttgtagtatagagaagactttacaaacagactatttgtcctcttgctacaaatgatatataatttaacatagagaaaataggaggactaatcgaatggaattaaaagattttacagaaaaagaacaggaaatgattaagaagggacttacgacgtctaagattagtgacaaggaaactgctgagaagattcttgcgctagtaccacaagacttgattaagcgaattccatttttcgtcagaaaacatgctacgactcgtacgattaaacgcatttcaattgaacaccctgaactctacgctgcagctcaaacaagtggtgagattccggaaaaagaacgcgaagaattgcgtcagattatcacgactatctttgagcaaaagatgaataagcatagtattaagtagagaatgaaaaaatattttattggcggtctgggaagcaatatctatcatagcaaggattttcttcaagaactagattcgcaggtttattttctaagtccatatgaaaagcatcttcgagatgaaacagaattgaaattatggtttaaaaatgagattgtagaggaagaatctatctgtctgataggtcattctcttggaggagatttggcgcgttatctcgcatcggaatttcatgaagtgaaaaaactgattcttttggatggtggctatctagatttagataagattttaactttagatgcggaattagaggaaactaaaaactatatcaaatctcaagtcgtttcagacttagctcttcttatttctaaagaaaaatctgaagcaaagcattggtcagaaaatatggagaaagccgtaagacagtcatatcactggaattctaagtataatagatatgagttagctataaaatatgaaaatatagaagcgatactccgcctacggaggaaaatacaagcttttaagagagaagtgggagataccttgtttatcagtcctcgctatcctaatgaagctacatggagagaggaagccctaaaagaattgccagactattttgatactattcttttagagaactttggccatgagctttatactgaagcccctagagaaatcgctagtctaattaatgagtggctcgcttattctcaatgagctacttgcattacttaaaatgttataagatttaaatctaaaaatcattattactcatataacaaaaaacgaacaggctctttttctgtcattcagaagagaacttgttcgtttttatcttgcttttttaaaacacgcgatacacatagggattctctggtttatcgactttggtaaaactatcgatttccaaggttgggaggttttgtttgagttctttatgatagtgattgaccagttttcctttggctgttatccaggtattattctcatactgacgggtatttcccttggtcagcaatccatagacaccagaatctgcgatacaatggataatgccgaagcggaatagaaattggctattggcatgactggggtcgttatagacaaagcctgtgaactggactgtcttgccctcaaattcatctggatagtcgtagatggcttccatgacttccatatagttttcgttggtaatctgaatgctatcttgggataagtatttattcgccgaagttcgcatttccttttcataagctgcttttgaaaaataagaactggtatctggtttcaaatattggcttgtcgttccttcactggtctgaatggcttgatccgtgccttctgataaaggaaaatggtagcctttggcagaaacggtctgagaatccaagctaacagttggaaaagttaaaccgacgacaataggaatggcaagaagagcaatactagttcctttagataatcggctattcagatgactgtgggttttgacttgcttcatccagatatacagctggacgattgccaagataaaggaaagcaccatggaaatataggccagataggaatagtgcatgttgatgtactggtttaatttgccggacagatggagataaatagtcaattcaaaatagccagctaaaactaaaaatcgaatcataggacgactccaatcaagagagaatatactaagacaacgagtgtcacaatcgtaatgaactgactgataaatcgtgctttcaagtaatttttcatcatgagaatatttttgatatccagcattgggccaattacgagaaaggccaaaactggtgctaagccgaaactcgagagaagagaagatccgataaaagcatcagcctcactacagagagaaagaagaaaggctaaaatcatcaagagcaggatggcaaaaagaggggttgcactgatagaggtcagaatccgtgtcggaacatagacctgtataacagaggcaaagagacagccaaataccaaataacgccccgtatcaaaaaattcatcaatggcctgcacaaagacctgaaaaactttttttgcagagctcaagtgagaaaaatcatgctcatgacaagccaaccgatcttctttttgaatcggttcttgccagaaaaatcctagaaaaatcccaagtatcacagccacaacgatggaacccagagctcgcaatagggcgatatggaaggagttgccaaaggcagaataggtcgcaaagagaacaatgggattgataacaggtgctgtcacaagaaagggaacggctgtgtaactgggaacctttttttccagaaaacgattgataatggggacgattccacattcacaagaagggaaaagcatcccgacaaaggtcccaaaaaagattctcccccaacgatttcgagggagaaaatgataaaccttttcaggtgtgatataaacctcaatcagccctgaaacaatacttcctatcagaacgaagggtagggcttcaatgattatagagagaaaaatagccccagtctgaagcacactagaagggagttgttggaaagcagtcatctagtttttcttttctgctttggcttttttctctttgtcatcagggaaagtgacttgtttcaaatcagggagtttagcaaactcctcaaacatcttgtccaagtcatcagtttttgtaaattttacagccataggtgcacctcgattctaaattctatctctattatactattattttaaggaaaagggaaaagttaaaattgagtatctaacgaataatagagcttgatatatcctgatatacactatgattgtgatataatagttgtggaataacggaggaaatgatggatcatgaaacaatcggtcaggttaccgatgaagtaaaagaaatttttgatattgttcttgaagcgagcgacataaaggtcaacaaagacggtttgagaagccatatgataaaacgccatcacaatgatgtgattcatcatattgaagacctggaactcatactaaggaacccagatttcgtcggggtcaatccacgagagaaagacgccagtttcgaatatgtaaaaagatttgatgataatgttcttgtttccatcaagttacataaaagtggagatttcttttatgttctgaccatgtatcgcttacaagatttcaagttacaaagtcgtattaagtctgggtagattgagaaagcttgacaaaaaaatagatagtgctagaataacattaacgaaagacatttgagggcagaaaggttcctgccgcaccttgaagaaggtatctgagatgctgggtacaccgaccagccaaatgtccgttatttcaaaggaggggcttaaatgctccttttttatttaaaatttcaaaatagattatccccaccgcagactctgtcttgcggttttttatttttcaaaaacacgcattttggacgattagaaatagaaatctaaatgctattcttcaccacaacaattaggataaataatttttaacacgagggctctcctttcaccaaatttgagtctgccgatcccttggctatcctttcctttcacaaacgagtcgcttattcaattataagtttacgtgctcctagtcacagtcagttgtgcttgatggaaagaatgacacctataaaaatgcgaggtagtgactataccactcacttattcaccaccccgtgatttgtagtagtgataggctttctcgctattattataaaacaaaataaagagcacaacactttttcattctgtgttgtgccttgagtgaaacgaaaggaattaattataaaagtttaaaaagtcaatgtgttattccaggtcaggaacatcttccagaactggctattatgtctgatccattaaatacttttgatgtcatggagtggtaaaaaaaggtggcaatgctctctaagtacaagttattgcactatagaatataaatctattccccacatattgtttttaaatactgtaagagctaatttgaaacgtttagcttatggtataatagattcatggataaaaaatatgaaaaaatctcccaggatttgggagtgacgttaaagcaaattgatactgttctaagtttgacagctgaaggggcgactattccctttattgcgcgttatcgcaaggatatgactggtagtttggatgaggtgacaattaaggccattatcgacttggataaaagcctgacaaatctcaacgaccgtaaggaagctgtcttagctaagattcaagaacaaggcaagttgaccaaggaattggaagaagctatcttagctgccgaaaaattagcagacgttgaagaactctatcttccttacaaggaaaagcgtcggaccaaggcaactattgcccgtgaagctgggctctttcctcttgctcgcttgattttgcaaaatgtagctgacttagagaaagaggctgaaaagtttgtctgtgaaggatttgcgactgggaaggaagccctgtctggtgcagttgatatcttggtcgaagccttatcggaagatgtgaccttgcgttccatgacttatcaggaggtgctgagacactccaaactcacttctcaagttaaggatgaaagtctggatgaaaagcaagtttttcagatttactatgatttttctgagacagttgggaatatgcaaggctatcgtaccttggcgctcaatcgtggggagaaactagggattttgaaggtcggttttgaacatgcgacggaccgtattctagctttctttgcagctcgtttcaaggtgaagaatgcctatattgatgaagttgttcaacagtcagttaagaaaaaggtcttgcctgctatcgaacgacgcattcggacagaattaaccgaaaaagcagaagaaggggctatccaactcttttctgacaatctgcgaaatctcctcttggttgctccgctgaaagggcgtgtggttctaggatttgaccctgcctttcgtacaggtgccaagctagctgtcgtggatgcaacaggaaaaatgctgacaactcaggtcatttatcctgtcaaaccagcctctgctcgtcaaatcgaagaagccaagaaagatttggcagacttgattggtcaatacggcgtggaaattattgctatcggaaatgggacggccagtcgtgaaagcgaagcctttgtggcagaagttcttaaagattttcctgaggtcagctatgttatcgtcaatgaaagtggtgcttctgtctattctgccagtgaactagctcgtcaggagtttccagacttgaccgttgaaaaacgctctgctatttctattgcccgtcgcttgcaagatccccttgctgaattggtcaaaatcgatcctaagtcaatcggtgtcggtcaatatcagcatgatgtcagtcaaaagaaattgtctgaaagtctggactttgtcgtcgataccgtggtgaaccaagtcggtgtcaatgtcaatacagccagcccagctcttctttcccatgtcgctggactcaacaaaactatttctgaaaatattgtcaaataccgtgaggaagaaggaaaaatcacttcacgcgctcaaatcaagaaggttcctcgtctgggagccaaggcttttgagcaggctgctggtttcctccgtatcccagaaagtagcaatatccttgataatacaggagttcacccagaaaattacgctgctgtcaaggaacttttcaaacgcttggatatcaaagacttgaacgaagaagcccaaagcaaactcaagtccctatcagtcaaagatatggcgcaagagctagaccttggtcctgaaacccttaaagatatcattgccgaccttctcaaaccaggtcgagatttccgtgattcctttgatgcacctgtgcttcgccaagatgtcctagatatcaaggatttagtggttggtcagaagctagaaggtgttgtgcgtaacgtcgttgacttcggtgccttcgttgacatagggattcacgaggacggcttgattcatatttcccatatgagtcgcaaatttatcaaacacccaagccaagtggtgtccgttggtgatttggtgaccgtttgggtcaagaaaatcgatactgaacgtgaaaaagtcaatctgtcgctcctcgctccaaatgaaactgactgattacgttaagcaggtttcactagaagacttcggcagaccttttatccatcatgtccagtggaattctcgtctacgttcgacaggtgggcgatttttccccaaagatgggcatttggattttaatcccaaggtttatcaggaattggggttggatgtttttaggaaaattgtccgacatgaactctgtcattatcacctctattttcaagggaagggctatcaacacaaggataaggattttaaggaactgttgaaagcagtggatggattacgctttgtaccaaccttgccaaatagccactctaaaccactcaagctctatcgttgtcaatcctgccagcaagcttatcatcgcaagcgaaggattaataccaaacgctatcgctgtggactttgtcgaggtaaattgcttctgataaatcagcctgaggactgatgaaagccgagcctacctgtgatatactatgtttaacatagcagaaagaggaaatatcatgaacagtaaattttataaaatgagacgaaatcgcatgatttcaggagttttggcaggtctgtcagacaagtggaattttgatgttacccttgttcgttttctatttgctatttttacagtcgcaaactttggacttggcgtgattatctatatcatcctagcttctatcatgcctaccaaggaagaaatcgaagcagaaatgtacggaacaggcccacgtaaacgcaaagaagctcaagccattgacgataatgaaggctggttttggtgaggtttaacaggaaatatttattatttgcactatttaaaagaagtgacataaatgactgaaaatcccttgttgctatttagcgacaagggattttggtatttaattataatctgtttcgtctttagaaagacgaattacctgatcagccattttccaaatactaggattgtgagttgcgatgataattgttctatttgcattacgaagttcaaggagaatttccataatttccttagaatttttaggatctagtgaggcggttggttcatcagctagaattaaaggaggattttttaggataatcttggcaagtgctacgcgttgagcttcaccaccagataattcatagattttttggttgagacttagataatccagtcttacagcttgcagtgcttgaagaagaagtctctctttttcttgtttcttgttcttttttttaccaatcattcccagctcaaggttttctcgaatggtctgactttctaatagtccaaagttctggaagagatagccaagttcgttacgataaaattcctcattttttactgaagtcaaaggatttcctttgtaaaatatttcccctttatcgaaagtctctagttttgctagcatattcagcaaagtggttttgccacaaccactatctcctatcaaagcatacaccataccactttgaaaattaagactcaagtctgaaaaaatgacacgagaaccaaattgtttccaaatatgttgtaattcaatcatactatcctcctttgatgatgctagcataagttttactttcctttttatcacagattttcaatagagaaacagctaatcctgaaaaactgagaaataaaatcagggtaatccagatattcttagaaataatgaaagctagactacttccgacaaagagagctattatttgagaagtgatatatctacagtgtaattcaaagaaataatacccagctatttttttcaagaatatggttttgcgaaaggcttcaaaatagagtaggtttaaacttgtaaaaagtaaaattgaagtcaagatagcaaaaataccactcgctaaattactataaatttcgattttaattttttgatttaactggaggtaggtctctctagcaaaggataatcctgaaatcataggatcaagttgatagtacttcaaaagttcttgtgtttgctgtaaatcggtaaaatagagatattctagattcgtaaaccaaaatatagaagaatcttttccaagtgccttaggagaaactacgataaaaataggggttgacaaccattgatcataagaaatatgggtagtattataaatgaatacatcttttttttgatcagtataagttatactaacttcgactctatgctttgtatcactactgtataatcgattagttaaatcttcttgtatgtttggttttatttgttcctcatttttcttttgttcttgaggtagtattacaagaacctgtccatcttttagattattgatttttttaaaggtttctgatgttaactctataccttcttttttgaagtagtcaggtgttacatagagaatatttttcccttccaagtcatagggattttgttcagaatcattatgagttgaaagagaatgctttatagcttgaatagcgagattatgtttgactaaaaaggcatttccattttctaaagaatattgaataaagtcaaaccatttattagcattcattttgagttcatctatattttttctttgacttgaacgacctgtttgaagattaacaatattggagtgttgtttccaagtagcttgtccagcctcatttttcataaatatatgatgataaatggacaagcgcccaaatcctacaataactaataagatagacagagcttgaccaaagtaaagaatacgtaaaattgacttaattggtaattttcctttaatgatagagataagatgaactcttttcaaagaaatagtaaaaagaaaagcgatgagaagacttagcaagagaagcaggctattataaaaaataaatagtattactaaaaaagtctgaatttcataaggatagcctaggtaaattactaaaacactagctattagggaagcaggcaagccgaaaagaaggatatcaagtccgtctcttatgatagaacgaaagaagagatttctgagacgttctccattaatcagtcttattcctgattgagagagagattgaatctgtccgataacaataagtgataaaaaggttaataaaaaaatgaaaagactagtaagttgattgggttgggcaatgagggtcaatacgaaggagactctattattttcaaatgtgttaactttttctagtccaagttgtttaaggtgaatagctaattcttgatttgttagcgatccactgataatattgtaattgttgagaagattacttttattgatactttcttgacttgcttgaggcatccagtctggaagtttcccatctccaaaaacttcgtagtaagtttgtgattttccatcactatctacttcccaaatggttcttgcgataagactattatgttctttagcaagactatttaatttttccttaacgatagaataatctgcttgcccgcttaatactgctgcacctgggaaaagggtttgtggaagagagtctttccaaaaggacaaagcaccaatcagaaagagtgccagaagaagattgctgatgaagagaaatatacgtttcataggaacctctttctaaaaaagagggagatcaacctccctcttcattgcagttatgcgaattatagcttactactttttaaaataagcactaaaaaactaaagttttacaaggtatcgaagaaaaccctttcacaattatattttactccttttttaaaaataaaacaagtgatgataggacttcgtatagtagatattttcaaaaaattccccaatcttacaaaaatgtaagattaaagtctcttttgtaaggttaggttatggcaagcggtctttttttgatgtaaactagactcataaagaacaaaggagtaacatcatgaaacaaatcttacataagaaaactagaaaaccaagcaataaagatatcgagcgtgttcagctgggatgcgcaatgatgcaagaaacatttcatttgatgggatattaagaaaggagattctcatgacacttttagatgtaaaacacgttcaaaaaatttataaaactcgttttcagggcaaccaagtagaagccctcaaggatattcactttaccgtagaaaagggtgactacgttgccatcatgggtgagtctggttctggtaaatccactcttctcaatattctagctatgctggataaaccaagtcgtgggcaggtttatcttaatggaacagacacagcaaccattaaaaattcacaggcttctagcttccgtcgtgaaaaattaggctttgtcttccaagactttaacttgctagatacgctttctgtcaaggataatatcttgcttccgcttgtcttgtcaagaagacccattacggagatgatgaagaaattggtggtgacagctgagaatctaggtatcaaccaattgcaagagaagtacccttacgagatttctggtggtcagaaacagcgtgtagcagtagcacgcgccatcatcacagaacctgaaattctccttgcggatgagccaacaggagcccttgactccaaatcatctgcagccttacttgatgtctttgatgaaatcaatgagcgcggccaaactattctcatggtaactcactcaacggcagcagctagcagagccaagcgcgtgctctttatcaaagacggcattctttacaatcaaatctaccgtggagagaagacagagcgtcagatgttccaagaaatctctgataccttgactgtcatggcaagcgaggtgaattagtatgtttcgattaaccaataagttagcggtatcgaacttgattaaaaaccgcaaactctactatccttttgcgctggctgttctcttggcagtcactgtcacctatctcttttactctctaaccttcaatcccaagattgctgaaatccgtggaggaacaaccattcaggctacacttggatttggtatgtttgtcgtcacccttgcgtcagccattatcgtcctctatgccaatagttttgtcatgaagaaccgttccaaggaactaggaatttatggcatgttgggcttggaaaagcgtcatcttatcagtatgacctttaaggagttagtggtatttgggattctaactgttggagcgggtatcggtattggagccttgtttgataagttaattttcgctttcttgctcaaactgatgaaattgaaggttgagctggtcgctaccttccaaatgaatgttgtcattgcagtacttgttgtctttggattgattttcctaggcctcatgttcctgaatgcccttcgaatcgcccgtatgaatgccctccagctttctcgtgaaaaagctagtggtgagaaaaaaggtcgtttcctacctctacaaactattcttggttccataagtttagggattggctactatcttgcccttactgtaaaagatcctctcacagccctaacaaccttcttcctagctgttttactggttatctttggtacttatctattgtttaatgcaggaattaccgttttcctccaaatcttaaagaaaaataagaaatactattaccaaccaaataaccttatctcagtctctaacttgattttccgtatgaagaaaaatgcagttggattagcaacaatcgctattttgtcaacaatggtcttggttaccatgtctgcagcgacaagcattttcaatgcttcagaatcctttaaaaaagtgatgaatccgcatgactttggcattactggacaaaatgttgaaaaagaagatttggacaaactcttgagccagtttgcaagtgacaaaggttatagtgtcaaagagaaagaagtgcttcgttacagtaactttggtattgcaaatcaagaaggaaccaagttaaccatttttgaaaggggacaaaatcgtgtccaacctaaaacagtcttcatggtatttgaccaaaaagactatgaaaatatgactggtcagaagctttctctatcaggcaatgaggtcggcctcttcgctaagaatgatggactgaaaggacagaaagctctaactctaaataaccatcaattttctgtaaaagaagaatttaatacagattttattgtgaaccatgtcccaaatcagtttaatatttttactactgattacaattaccttgttgtacctgatttacaagcatttttagaccaatttccagattcggctatctataatcagctttacggtggtataaatgtaaatatcagtgaagaagaacaactcaaagtcgctgaagaatatgaaaaatacttacaaaagtttaatgctcaattaaacactgaaggtagctatgtgtatggtagcaatctagcagatgctagtgctcaaatgagtgccctctttggtggtgtcttctttatcggtattttcctatccattatctttatggtcggaaccgttctggtcatctattacaaacaaatttctgaaggctatgaagaccgtgaacgctttattatcttgcagaaagtcggtttagatcaaaagcaaatcaagcaaaccatcaacaaacaggttttaactgttttcttccttcctttgctttttgccttcatacatctagcctttgcctaccatatgcttagtctgattttaaaagtgattggtgtaatagatacgaatatgatgttgattgtgaccttgtctatctgcgctatcttcctcatcgcctatgtgctgattttcatgattacttcaagaagttatcgcaagattgtccaaatgtaaaaaagatacctcgacttcaaaatcgaggtatttcttgtattctaaatgctgaaaagttgtccgagcaggaaggtaactcccatggtcaagagaccaatagcgaggttccgaatcatagctgttttggttggtgcttttccaagtctggcactagtgtaaccagtgagaagaagggccacaccgacgataaggacggtagcagggatacggtattcacttgggaaaatggtaattgaaagcatgggtggtaagctaccaaggaaaaaagaaataaagctagagatagcagcatgccatggattggtaaactcttcatactctatcccatatttttcctctaccaaagccttgagcggattatttaaaaaggctttgttggtcaagagttgagcagaggtttcacattctccattttggatataggctgcatagagagactttttggctagttccatatcttggtctagcaagacttgctcacgcgcaacggctgcttcctcggtatctttttgagttgaaacagatacatattctccaccagccatcgaaaaggcaccagctaagatagctgcaaatcctgataaaaagataatccagatattactcgtagcactagcaaccccgataaccacaccagcaatggaaataattccatcattggcaccaagaacacccgcacgcaggatatttaaacgacctgcaaaatttgaatcgatttcgtgatttgtttctgacatactattctccttttgatccagtataaaggaaaaatatagggaaatcaatcttttaaaactgtctgaaaaaagttgcactattctaatgatgtaaaaatgtcgtcatcttatctaatcgatcaaacacagaagggtaagagtatagaatggcatgaaagaattttaaattaaatactatcatcatttcgttcactttataatcgtttacaagaaaataatcattgttaaatcgagtaaaatctaactattttgcgaacctttttatattttttccgtaaaacgctttacaagttcttgaaaacatgatatagtaatggggcttagaaaatgagatgatgttttctagcaaatataaacccgagtaaaaaatgcctacggacaggcagggttgaatgccgaagcgtggttgaaaaaccacattattgatagggttaaaagcctacttttataagttgatgttaggacacttgtcctaattcataaatttttagtgtggtgaaagcacacgtcatcttgtgaaacgatcaataaagtacgtaatatttgctactagagagttaggaaacatcgggaacagacatactcaacagaaacaaacataaaaacgtcagaagattgcagagcaggtgaaaacctgctcttttttcatgagtcaacctttagttccttagttttcataaggtcctaaaaatatggaaaggagtatgtcttgaaagagttagatcaaaaccaagctccaatttatgaggccttggtgaagttacgcaagaaaaggattgttccctttgatgttccaggtcacaagcgtggacgaggaaatccagaacttgtcgaactcttaggagaaaaatgtgtaggcattgatgtcaattcgatgaaacccttggataatttaggtcaccccatttcgattattcgggatgcagaggagctagcagctgatgcttttggagctagccatgcctttctcatgattggaggaacaacttcatcggtgcagactatgattctcgcaacctgcaaggcaggagataagattattctgccacgaaatgtccacaaatctgctatcaatgcgctggttctatgtggtgccattcccatctatatcgagatgagtgtggatcctaaaattggtatcgctttaggtcttgaaaatgaccgagtagcacaggccataaaggaccatccagatgccaaggccattttgattaacaatcctacttactacggaatctgttcagacctaaaggggttgacagaaatggctcatgaagctggcatgatggttttggtagatgaggcccacggggcgcacttacattttactgataaacttccaatttctgctatggatgcaggtgctgatatggcagcagtttctatgcataagtctggtgggagtttgacccaaagttcgcttcttttaatcggggagcagatgaatcctgaatacgtacgtcagattatcaatcttacccagtcaacatccgcctcttatttgttgatggctagtctggatatttcgcgtcgcaacttggctcttcgtggtaaagagtcgtttgagaaggtcattgagctatccgagtacgctcgtcgtgaaattaatgccattggcggttactatgcttactcaaaagagttaatagatggtgtgtcggtctgtgattttgatgtaaccaagctgtcagtttacactcaggggattggcttaacaggtatcgaggtttatgacctcctacgagacgaatatgacattcagattgagtttggtgatattggcaatatcttggcctatatttcgattggtgatcgtatccaagacatcgagcgtttggtcggtgctttggctgatatcaagagactttactcgagagatggaaaagacttgatagctggagaatatattcagcccgagttagtgctgtctccacaagaagccttctattcagaaagaaaaagtttaaccttggatgattctgttggacaagtctgtggagaatttgttatgtgttaccctccaggaatccctatcttggctcctggtgaacgcattatacgtgaaattgtagactatatccaatttgccaaggaacgtggttgctccctccaagggacggaagatcctgaggtcaatcacatcaacgtcattaagagaaaggagaactagatggatttatggttttctgaagttcatactccagatgtgaaattgtccctgagaacagccaagcaactctacgctggtaaaagtgaatggcaggatatcgaagtcttggatacaccagcttttgggaaaatactgattttaaatgggcatgtcttgttttcagatgcggatgattttgtctacaatgaaatgaccgtccacgttcccatggctgtccacccaaatcccaagaaagtattggttattgggggtggtgatggcggtgtcgcccaagtattaacactctatcctgagctggaacaaatcgatattgtggaaccagatgagatgttggttgaagtctgtcgtgagtatttcccagactttgctgcagggctagatgatcctcgtgttaccatttactaccaaaatgggctacgctttttgcgaaactgcgaagatgattacgatattatcatcaacgatgcgacagatccgtttggccatacggaagggctctttaccaaggaattctacggcaatagttatagggctctgaaagaagacggtatcatgatttaccagcatgggagtcccttctttgatgaggatgagtcagcttgccgaagtatgcatcgcaaggtcaatcaagcctttccaatcagccgggtctatcaggcccatattccaaccagtccagctggctattggttatttgggtttgcatcgaaaaaataccaccctgtcaaagattttgacaaggaaggctggaaaaaacgccagcttttcacagaatactacactgcaaacttacatgtgggggccttcatgttgcctaagtatgtagaagacattttagaagaagaggaaggaaaaaaatgagtcgtttactagttattggatgtgggggcgttgcccaagttgctatttcaaagatttgccaagatagcgaaacctttacagaaattatgattgctagccgtactaagtcaaaatgtgatgacttgaaggctaaactggaaggcaaaacaagtacaaagattgagacagctgctcttgatgcagataaggttgaagaagtaattgccctgattgaaagctacaagccagaagcagttttgaacgtagcactaccatatcaagatttaaccattatggacgcttgtttggcaacaggtgttcactatatcgatacagctaactacgaagccgaggatacggaagatcctgaatggcgtgctatttatgagaaacgttgcaaggaacttggttttacagcctactttgactactcatggcaatgggcttatcaggagaaattcaaggaagcaggcttgaccgctcttcttggttcaggttttgacccaggtgtgactagtgtcttttcagcctatgccctcaaacactattttgatgaaatccactatatcgacattttagactgtaatggtggtgaccacggttatccgtttgcaacaaacttcaacccagaaatcaatctacgcgaggtttctgcgccaggttcttactgggaagatggaaaatgggtcgaagtcgaagctatgtctatcaagcgtgagtatgatttccctcaagttggacaaaaagatatgtatctccttcaccatgaagaaattgaatcattggccaagaatattccaggtgtcaaacgcattcgtttctttatgacttttggtcaatcatacttgacgcacatgaaatgtttggaaaatatcggtctccttcgtacggataccattaactttaacggccaagaaattgttccaatccaatttttgaaagccttgcttccagaccctgcaagccttggtccacgtactgtaggtaaaaccaatattggatgtatctttacaggtgtaaaagatggcgttgaaaagaccatctacatctacaatgtctgcgaccatcaggaatgttacgcagaagttggttcgcaagctatttcttacacaacaggtgttccagccatgataggtacaaaattagtcatgaacggtacttggaaacaaccaggagtttataaccttgaagaattggatccagatccattcatggaagctttgaatgagtatggtttgccttgggttgtggttgaaaatccacaaatggtggactaatgaagctagaacaagtaccaacgccagcctatgtcattgacttgcccaagttagaaggcaactgtcgtattttacaatatgtacaagaagaagctggttgcaaggttttgcttgcccagaaggcttattccctctacaaaacctatcccttgattagccagtatctatcaggtacgacagccagtggactctatgaagctaagctagctagggaagaatttccaggagaagtccatgtatttgcgccagcctttaaggatgcggacttggaggaattgctggagataacaaatcatatcgtctttaactcagagagacagttgcgtaaacatggggcccgttgtcgggatgctggtgtaagcgtgggtttgcgacttaaccctcagtgttcaactcaaggtgaccacgcgctctatgacccttgtgcacctggctcccgttttggagtaacttcagacaagataccgagtgatttgctggatttggtggatggtcttcattttcacaccctttgcgagcagggagcagatgatttagagacaactttgaaagcagtagaagagcaatttggagcctatttgcatcaggtcaaatggctcaatatggggggcggacaccacatcacaagagaggactatgatgtagatttgctgatttctgagatcaagcgtatccgagaaacttacaatcttgaaatctatatcgagcctggtgaagccattgcgctcaatgcaggttatctagcaactgaagtattggatattgtcgaaaacggtatggaaatcttggttttagacgcctctgcgacctgccatatgcctgatgtacttgagatgccctatcgtccacctttgagaaatggatttgccgctcaggaaaaagcccatacctatagactttcttccaatacctgtctgacaggagatgtgattggtgattatagctttgaaaatccagttcaaatcggtgatagactttattttgaagatatggctatttactcatttgtcaaaaataatacctttaatggtattggattgccaagtctctatctcatggatgagcagggtgactgcagattagtcaaatcttttggttatcaagactttaaagggagattatcatgatggacagtcccaaaaaattaggctatcgcatgccagcagaatacgagccccatcatggtacccttatgatatggccaactcgaccaggttcatggccctttcaaggaaaggctgccaaaagagctttcagccagatcattaagactatagcagaaggggaaagagtctatcttttggttggccaagactacttagctgaagcccaatcttatcttggagacaaggttatttatctagacattcccaccaatgatgcctgggcgcgtgatacgggtccgaccattcttatcaatgatgaaggccagaaattagccgtggattggtctttcaatgcttggggtggtgctgttgatggtctttatcaagattatgaagatgatgaccaagtagccagtcgttttgctgagaccttggaaatgcctgtttatgatgccaagccttttgtactggaaggcggagcgatacatagcgatggtcaaggaaccattctcgtgactgaaagttgcttgcttagttctggtcgcaatcctcatcttagtaaggaagaaatcgaaaccaccttattagagtgccttggagctgaaaaagttatctggcttccttatggtatttatcaggacgaaaccaatgaacacgttgacaatgttgctgcctttgttggtcctgctgagcttgttttggcttggacagacgacaaaagcgatcctcaatatgccatgtcagcagctgatttagcgcttttagaaaaggaaacagatgcaaaaggtcgtcagttcaccattcataaacttccaattccagctcttcatcaagttgtaaccaaagaggatttaccaggctacatctatgaagaaggagaagaagagcgatacgcaggtgaacgactagcagcttcctacgtaaacttttatattgccaaccaggctgtcctagttcctcagtttcaggataaaaacgaccaagtggccttagatatcctcagcaagtgttttccagaccgtaaagttgtcggaataccagccagagatattcttttaggtggtggcaatatccactgtatcacccaacaaatcccagaataggagaaaaagatgagaaatgtaagagttgcagccattcagatgcaatgcgctaaggatgtgtcaacaaatatccaaaccgcagagcgtttagtacgtcaggctgcagaacaaggcgcacaaattattcttttacccgaattgtttgaacgtccatacttttgtcaggaacgtcagtatgactactaccagcatgcccagtcggtgacagacaatactgccattcagcattttaaggtgattgctaaggaactacaagttgttttaccgatcagtttctatgaaaaagatggcaatgtcttgtataactccattgccgttattgatgcagatggggaagtgctgggtgtttatcgaaagacccacataccagatgatcattactatcaagagaaattttactttacgcctggcaacacaggtttcaaggtctgggatactcgctatgccaagattgggatcggtatctgttgggatcaatggttccctgaaacagcgcgctgtcttgcattgaatggtgctgaattgctcttttatcctacagccatcggttcagagccgattttggatacagatagttgtggtcattggcaacgtaccatgcaaggacacgcagcagcaaatattgttccagtcatcgcagccaatcgttatggattagaggaagtcgctccaagtgaggaaaatggtggacagagttccagtcttgacttctacggttcatcctttatgacggatgaaacaggagctattctagaacgagctgaaagacaagaagaagctgttctgttagcaacttatgacctagacaagggagcaagcgaacgcctaaactggggcttgtttcgagatagaagacccgaaatgtatcaatggattacggactagcaagcaaacctatatttacaaattttagaatatctgacgactgtcatgataaaaaaagcaaatagcagtaacctctgcctatttgcttttctttttataaaatatatttctcaatagcacgcgcaacgccgtcttcttcgttgcttgctgtaacggcatccgcaagagatttgacataatcactggcatttcccatagcaataccaaggcctgcaaactggagcatttcgatatcgttattagcatcgcccatagccataatctctgaggaatcaatcttcaaaatatctgctagtcgagaaagagcagtggcctttgtcgttccaagtggcatcgcttcataaatgacaggctgcgaacgaactccactaaatcgttggcaaagctcctcagcaaaacgctgctcaaaatcgtccgtttggctatctgtccccaaaaacatcccttgaaacatacggtacttgccactagtcgcttcctcaagagaaatttcagtcaggtctgaaaagaccagcttggcatcattttgaacaatttcattaggcttaccaccgaggacaaaataatgctcctcatcaaaaagagtcaactgaacatcacttttttcagctaggtcatagagatattcgatgtctgctggactaagttcttgccagtcaactagtccccagtcacttgtctggtgagttgaacaaccgttattgacaatgacatactcattctggaggtcgagtcccaattttttgtagtaggggaggacaccgaaaagcgggcgacctgtacagagaaccagtttgacacctttttcaatagcttggtgaatagcagtaatgtgagcttgtgggatttccttggcttcattgaggagggttccgtccatatccaaggctagtagtttaatcataggtcttccttctttttcttttggtattattatagcatattttggaggaaaggaggaggaatcttcgggctaatcatggtataataaaaggtaatgaaaaattctaacgaggcggagatgaaattactttatactgatattcggacttctttgacagaaattctaactagagaggcagaagagttagttgctgctggcaagcgggtcttttacatcgctcccaactctctttcttttgaaaaggaacgcgccgtgctggaatgcttgtcccagcaggcttcttttgcgattaccgtcacgcgctttgctcaaatggctcgttacctgattttgaatgatttgccagctaagatcagtcttgatgatatcggtcttggtatggccttttacagatgtcttactgaacttgatccaaaagacttacgagtatacggcgccatcaagcaggatcctcagtttatccagcagttgattgatctttatcatgagatgaccaaagctcagatgagttttgtggacttggagagtttgacggatgaggataagagagccgatttactcttgatttttgagaaagtaacggcctacctcaatcaagggcagttagctcagggaagtcagttatcccatttgattgaagctattgagaatgacaaggtaagtagtgattttactcaaatcgccttggttattgatggatttacccgtttttctgctgaggaagagcggattgtggacttacttcatgccaagggtgttgagattgttattggggcttatgttagtaagaaagcctataccagtccattctctgaaggcaatctctatcaagccagtgtggagtttctccatcatctagcctttaaataccaaacacctgcccaggattattctcaaactcatgagaagatggatagctttgacaaggcctctcgtttgctggagtcttcttatgacttttcagaactttccttggaaattgatgatagggaccgtgaaaacttacaaatctggtcttgcttgacgcaaaaggaggagttggagctagtagctcggagcattcgtcagaaattacatgagaactcaaatctgagttacaagcattttcgtattctcttgggggatgtggcttcttatcagttatctcttaaaaccatttttgaccagtaccagattcctttctatcttggtagaagcgaatccatggcccaccaccctttgacacagtttgtcgagtctattttagctttgaaacgctatcgtttccgtcaggaggatttgattaaccttctcagaacaggtttgtataccgaccttagtcaggctgatattgatgcttttgagcaatatatccgctatcttggtatcaatggcttgccagcctttcagcaagccttcaccaaatcccaccatggaaaatttgatttagggcgtttaaatgctcttcgtctgcgtattgtaacacctcttgagactctctttgccagccgaaaacaaaaggctgaaaatctcttacaaaagtggaatgtctttctaaaagaaggagcagtaactaagcagttacaagatttgacagctactatgaaagttcttgaacaggaaagacaagccgaagtttggaaggcattctgccatgttttagaacaatttgcgactgtttttgctggttcacaggttagtctagaggactttctagccctgctccattctggaatgagtctatctcaataccgtaccattccagcgacagtgaacaccgttctggtgcagagttatgatttgattgcgccactgacagctgactttgtctatgccattgggctgactcaggacaatttaccaaaaatcgcgcaaaataccagtcttttaactgatgaagaaagacaaagcttaaaccaagcgacagaagaaggcgttcaattgctgattgccagcagtgaaaacctcaagaaaaatcgctacactatgctttccttggtcaattctgcgcgtaagcagttgattctgtcatctccaagcctttttaatgaaagtgaaagcaaggagtcagcttatcttcaagagctggtgagttttggatttagtcgaagagaaaagagaatgagccataaaaatcttagcaaagaagatataggttcatatcacagccttttgtccagtctggttgcctatcaccagcagggcgagatgagtgagactgagcaagatttgacatttattaaagttctagcgcgtgtcatgggtaaaaaactagaccagcaaggtctggaaaatccagccctcccaaccagcccaagcagtaaacccttagcaaaggacaccttacaggctctctatcctgctgaacaggaattttacctgtctacctctggtttgacggagttttaccgcaatgaatacagttatttcctccgttatgttctaggcttgcaagaagaattacgcctgcgtcctgatgcccgcagtcacggaaatttcttgcaccgtatctttgaacgcgccttacagttgcctaacgaagattcctttgacaaacgtttagaacaagctatccaagaaaccagtcaagaacgtgaatttgaggctatttatcaggaaagtttggaagcccagtttaccaaggaagttttgcttgatgttgcacgaacgactggccacattctccgtcataatccagccatcgaaaccatcaaagaggaatcgaatttcggtgggaaagagcaagcctttattcaattggacaatggtcgcagtgtttttgtacgaggtaaggttgaccgcattgaccgattgaaagctgatggagcgattggagtggtagactacaaatccagtctgactcagttccaatttcctcatttctttaatgggcttaattcccaactgccaacctatttagctgccttaaaaagagaaggggagcagaacttttttggtgccatgtacttggaaatggctgaaccagtccaatctttgatggccgttaaaagtctggcaggtgcagtagtagaagctagcaagtctatgaaataccaagggctctttttagaaaaagaaagcagtcatttaggtgaattttacaataaaaataaggccaatcagctgacggatgaggaattccagcttctactggactacaatgcccatctttacaagaaagcggctgagaagattttagaaggccaattcgccattaatccttatactgaaaacggcagaagtattgcaccgtatgttcagcaacatcaagccattacaggatttgaagctaattaccatttaggccaagcccgtttcctagaaaagttggacttagctgatggcaaacgtctggtcggagaaaaactcaagcaagcttggtttgaaaaaataagagaggagttgaatcgatgaagcccattccctttttaactgaggaggaaattcaaaaactgcaagaagcagaagcaaattcgagcaaggaacaaaagaaaactgccgaacaaatcgaagccatctacacttctggtcagaatatccttgtctcagcgtcggctggttctgggaagacttttgtcatggccgagcgtattctggaccaattggcgcgtggtatcgaaatttctcaactctttatctcaacctttaccgtcaaggctgcgactgaactcaaagaacgcttggagaaaaaaatcagccagcaaatccaagaaacgcataatgtcgatctcaaacaacacttgggccgccagttggcagacctacccaacgcagccatcgggaccatggactctttcacgcaaaaattccttggtaaacatggctatctgcttgatattgcgccaaatttccgtattttacaaaaccaaagcgagcaacttcttctaaaaaacgaagtctttcatgaggtatttgaagcccattaccaaggcaaacagaaagagacctttagtcatttgctgaaaaattttgcagggcgtggcaaggatgaacgggggctgcgccagcaggtctataaaatctatgacttcctccaatccaccagcaatcctcagaaatggctgagtgaatctttcctcaaaggctttgaaaaagctgattttactagtgaaaaagaaaaactgactgagcaaatcaagcaagccctttgggatttggaaagctttttccgttatcatctgggtaatgatgccaaggagtttgcaaaggctccctatttagaaaatgttcagttgattctggatgaaattggctccttaaatcaagagtccgatagtcaggcttatcaggcagtgcttgcgcgtgttgtcgcaatttcgaaagagaaaaacggtcgggccctgactaatgccagtcgcaaggctgatttgaagccactggcggatgcctacaacgaagaaagaaagacccagtttgctaaactaggacaactgtcagaccagataaccattctcgactatcaagaacgttatcatggagatacctgggaactagctaagactttccaaaccttcatgagtgattttgtggaagcttatcgtgaacgtaagcgtcaggaaaacgcctttgaattcgctgatatcagccattacaccattgagattttagagaaatttcctcaaggccgtgaggcttatcaggatcgcttccacgaagtcatggtcgatgagtatcaggataccaaccatattcaagaacggatgctggaattgctgtctaatggtcacaatcgctttatggtgggagatatcaagcagtccatctaccgtttccgtcaggcagacccgcagattttcaatgagaaattccaacgctatgcgcaagattccaaagaaggaaagctgattctactcaaagaaaatttccgtagtagttcagaagtgctatcagcaaccaatgatgtttttaaacgtctcatggaccaagaggtcggtgaaatcaactatgacagcatgcaccaacttgtttttgccaataccaaactgactcccaatccagataacaaagcagaatttctcctctacgacaaggacgatacaggtgaggaagaagagagtcaaacagaaacgaaactaacaggcgaaatgcgtctggttatcaaggaaattcttaaactccataaggaaaaaagtgttgcttttaaagaaattgcccttctgacctccagtcgcagtcgtaatgaccagattctccttgccttgtctgagtacgggatacctgtcaaaacagacggcgagcaaaacaattatctccaatccctagaagtgcaagtcatgctagacactcttcgtgtcattcataatcccctgcaagactatgccttggttgctctcatgaagtctcctatgtttggatttgatgaggacgagttggcacgcttgtctctccagaaagcagaagataaagttcaagaaaatctctatgaaaaactggtcaatgctcaaaaacaagtagctagccagaaaaacttaattcatacggatttaactgaaaaactaaatcaattcatggatatcttggcttcttggcgtctgtatgccaaaactcactctctctatgacttgatttggaagatttacaacgaccgtttttactatgactatgttggagctttgccaaatggccctgctagacaggccaatctctatgccctagctcttcgggctgaccagtttgaaaagagcaatttcaagggcttgtctcgttttatccgtatgattgaccaagttttagaagcccagcacgatcttgcaagcgtggcagttgcaccgcctaaggatgctgtagaactcatgaccattcacaagagtaaagggctggagtttccttacgtttttattctcaatatggatcaggacttcaataagcaagacagcatgtcagaagtcattctcagtcgtaaaaatggactaggtgtcaaatacattgccaaaatggagacaggagcagtagaagctcactatccgaaaaccatcaagctctctattcctagcctgacctataggcagaatgaagaggaattacagctggcaagctactcagagcagatgcgtctcctttatgttgccatgacgcgggctgagaaaaagatctatcttgtcggcaagggttcgcgtgaaaagctggaatccaaggaatacccagcaactaaaaatgggaaactaaatagcaataccagactgcaagcaagaaatttccaagattggatctgggctatcagtaaagtatttgccaaggatcatctcaactttagctatcgttttgttggcgaagatcagttgactagagaagctatcggtgagttggaaaacaagagccctctacaagatagctctcaagcagacaatcgccagtctgaaaccatcaaagaagcactggaaatgctgaaagaggtggaagtttataatactcttcaccgcgcagccattgaactgccaagtgttcaaactccaagtcaaatcaagaaattctacgaaccagttatggatatggaaggtgtcgagattgcaggtcaaggccagtcagtagacaagaaaattagctttgagttaccagatttttcaaccaaagaaaaggtaacaggagctgagattggtagtgctacccacgaactgatgcagagaattgacctcagtcagcgaccaacccttgctagcctaacagaaactctcaaacacgttcaaaccagcccagctgtcagagacaagatcaatcttgctaaaattcttgcattctttgacacagcactcggtcaggaaattctctctaataccaaccatctttatcgcgagcaacctttctccatgctcaaacgagaccaaaagagtcaggaagactttgttgtccgtggtatccttgatggctatctgctttacgaggacagaattgttctgttcgactataagacagaccgctatgatgaaccaagtcaactcatagaccgttatcgtggtcagttagccctatacggagaggctttatctcgagcctattcgattgaaaatattgacaaatacttgattttactcggtaaagacgaggttcaagttgtaaaagtataatctagaaaggagacctcatgacacttccagttagaaaatccctgcatgatgcggttttacaggcttcaaaagctgatacttgggaacaagctaccaaggaatggaatgaagtttccttgatttttaacggtatcggccgtagcaattgtgtctgtggaaatgccatcaaatacgcctacgaactctttaacggagtgactggtcaacgactatttcctataggtagcgactgcgttcgtcattttcatcgattgtctcttgaccagcaattggaagaggaagaaaaactgctaagaaaggttgaaaatctaaccagaaaagctcagaaaaaggaaaaaatcaaggtcaataaaagtgactttgacgagcgacttctaaaatggctctgggaaaaaggtgttttcaaacccaatcgtggcaatcaatttgcgcctgagagagactaccagcttttcctagaagtctttcagggaggaagttggaccaaggcagagcctaagaagaaggctcggatggaagaagtccttgaaaagtgtatcaaaccctttttacttggcaaaccggatgaccaactctaccttgtcaagctaggcaaggagaaaattgactacgagcaagaactccgaatccaagcagagaaagagcgcaaaaagagagataaaatcgccaagcaatatgcagacaatctggtcctagccatgggcccagcagagcgcgcttatcaagattactttggctttacagaaaccctaactcaagaagaacgtaagtgggagaaaatactttttggtaaaaatagaacagaacgggctatcaaggccaaacaataccaaaaagagctggaaaaagaccaacgaattgctagtcaggatccaattgaaagaaagcagaagcagacctggctcctcaattcctattttcgtgagcttcctgaagaaaaagctcgattttctaggctcttattagaatatcgaaaaagtggagaagttcccttttcaaccgaatatctgtcagatcatcttattgactttttctataaaatgaaagcctttgagtttgaaatcgcaccagaacaagttcgagattttataaaagaaagcctccaggcagaacatctctcatcagcacaggaatgctggatagaagggattctaacaaattgcatagtcccatttttatctcgaatactcatctaaaactaaatatataagtcttagaattttatataaagttaatatataaattaagtggggttgaaatcagtcttcctttaaaaagtagctattacaaacaaaagcttatgcaaaaaagactaatttatgatagaatagaggataagaaagaaaacgtttttacaattttttcaatccgaaggagatatattatggctactattcaatggtttcctggtcacatgtctaaagctcgtcgacaggttcaggaaaatttaaaatttgttgattttgtgacgattttggttgatgcacgcttacctctatctagtcaaaatcctatgttgaccaagattgttggtgataaaccaaaactcttgattttaaataaggcagacttggctgacccggcaatgaccaaggaatggcgccagtattttgaatcacaaggaattcagacgctagctatcaactccaaagagcaagtgactgtaaaagttgtaacagatgcggccaagaagctcatggctgataagattgctcgccagaaagaacgtgggattcagattgaaaccttgcgtaccatgattattgggattccaaatgctggtaaatcaactctcatgaaccgcttggctggtaagaaaattgccgttgtcggcaataaacctggtgttaccaaggggcaacaatggcttaaaaccaataaagatcttgaaatcctagatacaccggggattctttggcctaagtttgaggatgaaactgtagctcttaagttggctttgactggagctatcaaagaccagttgcttcctatggacgaggtgaccatttttggtctcaattatttcaaagaacattatccagaaaagctggctgaacgcttcaaacaaatgaaaattgaggaagaagcgcctgttattattatggatatgacccgtgccctcggtttccgtgacgactatgaccgtttctacagtctcttcgtgaaggaagtccgtgatggcaaactcggtaactataccttagatacattggaagacctcgatggcgacgattaaagaaatcaaagaactccttgctactgtcaaggaccttgatagccctattattttagatcttgaaaaggataatcgctctggaattcaaaaggaaatcagcaagcgtaaaaaagctattcaggcagaattggatgaggatcttcgtttgaaatccatgctttcctacgaaaaagaactgtataagcaaggattgaccatgatagcaggtgttgacgaggttggtcgtggtcctcttgctggtcctgtagtcgctgcagcagttattttacctaaaaattgtaaaattacaggcctcaacgacagcaagaaaattcctaaaaagaaacatctggagattttccaagcagttcaggaccaagccttatcaatcgggattggtatcatggataatcaggtcatcgaccaagtcaatatctatgaagcaaccaaactggccatgcaggaagcaatctctcagctcagtcctcaacctgagcaccttttgatagatgccatgaagctggatttacccatttcacaaacatctatcatcaaaggagatgcaaactctctctctatcgccgcggcttctatagtagccaaggtgacacgtgatgaattgatgaaggaatttgaccagcaatttcccggctatgatttcgctgctaatgcaggatatggaacagctaaacacctggaaggactgaaaaaaataggagttacccctattcatcggaccagctttgaacccgttaaatcgctggttttaggagaaaaagaaagttaaattagaaggaatgattatggaggaacagtcagaaacactcagttccaagaaagaatttgcctttgcctcgagtaccatattatcccaagttggacgaggaatcattgttggtctcgttgttggaattatcgttggatcctttcgtttcttaatcgaaaaaggtttccacctgatacaaggactttatcaagatcaagcgcatctagtgcgcaatctttttatcattggtctattttatttaatagtttgttggctcagtgcgaaattaactcggtcagaaaaagacatcaaaggctcaggaattcctcaagtcgaagccgaattaaagggactcatgactctcaactggtggggcgttctttggaaaaaatatattttaggaattcttgctattgctagcggtcttatgctggggcgagaagggccaagtattcaacttggagcagtcggtggtaaaggaattgccaaatggctcaaatccagtccagtagaggaacgatccttgattgctagtggagctgccgctggtctagctgcagcctttaatgcaccaattgcaggtcttctctttgtcgtagaagaagtctatcatcacttttctcgctttttctgggtgtctactctagcagctagtctcgtagcaaactttgtttccctactcatatttggtctgacgccagtgctggatatgccagataacattcctctcatgaccctggatcagtattggatttacctccttatgggagtttttcttggactatctggttttctctatgagaaagctgtacttaatgttggtagtgtttatgattggcttggtcaaaaaatccatttggatagagcttattacccaatttttgcctttattctcatcctaccagtcggaatcttcttaccccaaatccttggtggtggaaatcagctggttctttccctaactgagcaagattttagttttcaagttctattagcgtactttttgattcgctttgtttggagcatgattagctatggaagtggcctgccaggaggaattttcctaccaattttggcacttggctccttacttggtgccctagttggtgttatttgtgtcaatcttggacttgtcagtcaagagcaattccctatatttgtcattctaggaatgagtggctattttggagcaatatccaaggctcccttaactgctatgatactcgtaactgagatggtaggagatattcgcaacctcatgccacttggtttagtaaccttggtcgcctacatcatcatggatctactcaagggggcgccagtttatgaggctatgttggaaaaaatgctacctgaagaagcgtcagatgaaggagaagtcacacttattgaaattcctgtatcagacaaaatcgctggaaaacaggttcatgaactcaatctaccacacaacgtcctcatcacaacacaagtccataatggtaagagccaaacagttaacggctcaaccagaatgtatctcggagatatgattcacctagttattccaaaaagtgaaattgggaaagtcaaagatttgttgttgtagtgatttttacataatttatgttatgtaaaaaataaacttcttaattaaatatattagaaaaccgattctcagcaatgagatcggttatttttacatataagatatttcacgtacaaataattgagctttggaaaaataagactataattaagttagaattgataatgcataaagctagaaaggagtttactgtataaaatctgtacagtaagattaaaatcatgaaaaagaaaacaatagcaattatacaatgtattttgtatcccatagctccttacacagctcttcagttaagtagaatgaacagaagtatcgttactgataatctcttttttattttccttattctgttgactatttcattctggtttagtatttggaaactagaaaaagcactagataatgattcacaatgaaactgcaaagatttaaatccattttacgcaaaaactggaaaattttgtactttttcctaaacagtggataagcccttgatacaactgggtttaagacgtaaagtacactctctaaaaattgtactttataattgaaatgtactttattttaaggcaagataaagtacattttcactaaactaaaatgaacatttgaaaaatttcagtttttactttgataacgtacatttttagctatttttgttcaaaaaaatttttttagtaattgggacgatttaagtcttttttatcacttttaaaaaaactctatgacatctttctgaaaaactataattttcttgaaaaataaataagtctatgctatactactagtagacttatttatggagaaaatacatgaaacgtgagattttactggaacgaatagacaaactaaaacaaatcatgccctggtatgttctggaatactatcaatctaagctagctgtaccttacagttttacaaccttgtacgaatatctcaaggaatacgatcgatttttcagctgggttttagagtctgacatttcaaatgctgataaaatgtctgatattcctttatctgtcttggaaaatatgtctaagaaagacatggaatcttttatcctttatttacgtgaacgtcctttgctgaatgctaatacaaccaaacaaggagtttcacagacaactatcaatcgaaccttgtcagctctttccagtctttataagtatctaaccgaggaggttgaaaacgatcagggggaaccttatttttatcgtaatgtaatgaaaaaagtttcaaccaaaaaaaagaaagaaacgcttgctgccagagctgaaaacatcaagcaaaaactctttttaggtgatgaaacagaaggtttcctaacttatattgaccaagagtatccacaacaactttcaaatcgcgctctctcatcattcaacaaaaataaagaacgtgatttggccattattgcccttctattggcgtctggtgtccgcttatctgaagctgttaatctggatctaagagatctcaatctcaaaatgatggttattgatgtcactcgaaaagggggtaaacgtgactcggtcaatgtcgctgcctttgctaagccttatttagagaattatttggccattcgaaatcaacgctataagacggaaaaaacagatacagccctttttttgactctctacagaggagttcctaatcgtatcgatgcttccagcgttgagaaaatggttgctaagtactctgaggacttcaaagtccgtgtaacaccccataaactacgacataccctagcaaccaggctctatgatgccactaaatcgcaagttttggtcagtcaccagctaggacatgccagcacacaagtcactgacctctatacccatatcgttaatgatgaacaaaagaatgctctagacagtttataaaatacataaaataaattatgtaatatatggtttttaaaaaagaagctggtcctacaaccaacttctttttgatttatccaactaccgcttcagcgatttcttcacggctaataccagcgaaatagcgtgtgatatcaatggtttctaacgccttaaggacatcttcgcgttcgtatttcaccccacgaaggacatcttctactgcagcaacatcttcaataccaaagaagtcaccgtaaatcttgatgtcttggatttttgattcgagaacattagcaaagacttccaccttaccactagtgaattttgttccacgacggacgttaaattcaggtgatttaccatagttccagtcccaagttccaaacttagtatctttgatacggttaatttcagctagttcttcctcagaaaaaacgtattctgtcatctctggatactcttttttcatgtattccaagagtaagtcacggaattcttcgactgtgattttttctggtaattcattgataatattggttacacgagcacgaaccgatttcacaccttttgattcaaatttatcttttgaaaccttaagggcatttgctaggactgacaaatcaacgtcaaagagcaagcaaccatggtgcatgatacgaccgttgatataggcttgagcattgccacagaatttctttccatcaatctcaaggtcattacggcctgtgaactcagctttaaccccaagttgagccaaagtattgataactggagttgaaaaactcttgaagtcaaaagctttgttttcatcttcttttgagatgatcgtgtagttgaggttatttaaatcgtggtaaacagctccaccaccgctgatacggcgaactacctcgatgccattttcgcgaacataatcacggttgatttcttcgatggtattctggtgacgaccaacaatgatagatggcttgttaatccaaagtaggaaaatttgatcctcatccaaaaggtgtttaaaggcgtattcttccaaggcaatattaaaggcagtgtcgtttgaatgattgataatgtatttcatgatatccctttatacgatagagactggaaaacacctttccagtctaatctatctttcttttattttttcttaggtgaatggatggccattcctaaaacatccgcaaatgcttcgtacatcacttcagagtaggttgggtgtccgtggatagtcttcagcatttcttcaacagtaatttccatttcgataatgctcgatgcttcattgatcaattctgcagctgcaggaccgatgatatgaacaccaaggatttctccgtatttcttatccgcaataactttaacgaaaccttgagctgcatccgatgcaatagcacgaccgttagcagcaaagttgaacttaccgatggctacatcgtatttctcacgggcttgttcttctgtcaaacctactgctgctacttcaggaagagtgtagatagctgcaggagtcaaattcaatttggcaacagcatgatttcctttaagggcattttcagcggcaacttcacccatacggaaagctgcgtgagccaacatcttagtaccattaatatcacctggtgcgtagatacctggaacagaagtttccatgtattcgttgaccttgatacgaccacgatccaattcaaactcaacctctccaataccttcaaggtctggcacacgaccgattgaaagaagagctttatttgcaatgatatcgtcttttccttcaactttaatacgaagttgaccattttcttcgatgatttcttgcagtttagtaccagtcaagatggtcattcctttacgttcaaggatcaagcgaaggttcttagaaacttctgaatccatagctggcacgatacgatccatcatttcgataacagtcacttttgaaccaaatgtcatgaaggcctgaccgagctcgataccgacaacaccaccaccgatgataacaagactttctggtacttcgttcatttcaaggatgtcgtcgctggtcatgacaagtggagattccataccagggatgttgatcttgctgacttttgaaccaccagcaaggatgattttcttggtttcaagtaattcagagccatttaccaagacgttcttgtctttagtaatggtaccaattcctttatgaacagtaactccgtagctacgaagaagaccagcaactccaccaaccaaagtattgactaccttagacttggtttcaaggagtttgtccatatcaacagtgaagttaggattttcaatcacaataccacgatttgcagcatgaccgatattttcaataatttcagcgttatgtaggtaggttttagttgggatacatccacggttcaagcaggttccaccgagttcagatttctcaacaagggcaaccttcccaccgagttgggcagctttaatggctgcaacataaccagcaggacctccaccaatcacaacgatatcaaaagcatcatcgctcttaccatcatcgtttgaagcacttgctgtaggtacagggctagcttctggcgctgctgctccagctgttgggatattttccccttcttcgccaaggtaaccgataacttccgttacagggactgtttcaccgtcccctttgaggatagcaatcaagtacccatcttcttcggcttccaattccatgctgactttatcagtcatgatttccaaaaggatttctccttcttttacaaattctccgacttttttattccattggacgatttgtccttctgtcatatccacgccggcttttggcataattacttctaaggccatgtcttccttcctttatctatatcttaaaaatgaatactcttgtacttaaatcaacattgagattggattttcaatcaattctttcaagtctttcataaacttagcaccagccataccatctacgacacggtggtcaattgttaaaccaaggctcatgattgggcgaatcacaatttcaccattgactacaactggcttctcgattgtcgaactcacaccaaggatagctgagtttggttggttgatgataggaccaaaagactgaacaccaaacattcccaaattactgattgtgaaagttgaattttgcagttcgcttggagctaatttaccatccaaggtacggccaataacatccttgaaggctacaaccagttctgaaagactcatcttctcagcattgtaaacaacaggtgtcattaatccattatccatcccaactgccatggcaagattgacatagttgtgagtgataatagtcttgccatcttctgtcaatgaagcgttgatgtatgggtgtttcataagagtcttaacaactgcaagtgaaagaaggtctgttacagtagtcttcttcccagttgcttccatgattggttcaagcaccttcttacgaagagccaacatttcagtcatatcaacttcatagttgagagtgaaggttggcgcagttaggtaagattcaaccatccgttgggcaataaccttacgcattggtgtcattggaatacgctcaatttcaccgtatggtgttacgttatcaggaacttcttccactttttcaatctgagcaggagacttgatggtgtcgttttcgatattttcaggaagcaaggccaaaacatccttcttcatgattttaccacgatgaccagttccttggatttcctgccaagcaatgttatgttcgagggcaattcgttttgcaagtggcgaaatgcgaaccacatttgtgtctttataagtttccacgtcttctttgtggacacgaccgtttgcacctgagccagaaacgtcgtagaggttgatccctaaatcatccgctaactttctagccgcaggagtcgctcttagcttgtcatcagccatgacctctccaattctatactaagatattaaggacgaagagctccgtacctaaaagatacaaagtttctcgtcagctttattttgtttacataacttatcttatgtaattctattctttgttatatgttttacgaatggcatctttgatgctttcaacggttggaatcattgcattttctaggttttgtgcataaggcattggcacatcttctcctgcgcaacgacggattggtgcatctagatagtcaaatgcttctgattctgaaataatagctgaaatttcaccgatatagccgcttgttttatgggcatcgttaaccagaacaactttaccagtcttcttaactgagttaatgataatctccttatcaagcggaacaagggtgcgtgggtcaacaatctcaacagaaattccttcttctgctaattcttcagctgcttgaaccacacggcgaagcatttttccataagtaacaactgttacatccgtaccttcacgtttgatttccccaactccaagtggaatcgtatagtctggatcaactggtacttcccctttttggttaaattctgacttgtactcaaggataataacagggttgttatcacggatagaagacttaagcagtcctttcatgtccgcaggcgtacctggtgctacaaccttaagtcctgggatatgagtgaaccaagactctagagattgtgaatgctgggctgcagaaccaactccgttaccagctgcacaacgaacagtcattggaacctgacctttaccaccaaacatgtaacgtgttttagcagcttggttgacgatattgtccatggcaataaccgagaagtccatgaaggtcatatcaacgattggacgaagtcctgtcatggctgctcctgctgctgctccagagatggcagcttcagaaataggacagtcacgaacacgttctggaccaaattcttcaagcattccaacagaagttccgaagtctcctccgaagacaccgacgtcttctcccatcaagaacacattttcatcgcgacgcatttcctcagacatagcaaggataatggtgtcacggaaggacattgtttttgtttccattttatctctttctccttagtctgcgtaaatatcttcaaaggctgattcaagcggtgggaatggactttcttctgcaaatttaacagaagcttctactgcttccttgacttgcgtttggatttcttccaattcttcggcacttgcaatagtgttttcaatgaggtacttgcgaaggttttcgattgggtctttttgtttccacaattccacttcttcgcgggtacgatatttaccagggtcagatgatgaatgaccaagccagcgataagttacactttcaatcaagactggaccattgccaccacgaacatgatctacagctttcttaaatccttcatagacatctatgacattgttaccgtcttcgatgaacattccaggaattccataagcagcgctacgttgatggatatgcttcacattagtcattttcttgatatccgcagagataccgtaaccgttgttgatgcaatagaaaatgactggcaggttccagatagaagccatatttactgcttcgtggaaaacaccttcgttggtcgcaccatctccaaagaagcagacaacgatttttccagtatgttgcatttgctgactgagggctgcaccaacagcgattcccataccaccacctacgataccattggcaccaaggttaccagcatcaagatcggcaatatgcatagatccacctttacctttacaggttccagtgtatttgccaaggatttcagccatcattccgttgaggtcaatccctttggcaattgcttgtccgtgaccacggtggtttgatgtgattagatcatctggattgagagccaacatagcacccacgttagcggcttcctctccaacagaaaagtgcgtcattcctggcactttccctttctttactaattgcgcaatttttaagtccatacgacggatttcttccatcttacggaacatctctagcaaaagatttttatctaaaattgacatcttcttgcctttctaactttcttcttaccttactattttaccgtttttggcaaatactgtcaaagtttttctaaagaaaatttcacaaattaaaaaagaaaaccccatagaaataagggattttcttatcaagaatattttttcacaaactttttagcgtttagatttttctaaagattcaaatctcttcataatcacagttaaacgccaacggtagagaaccccactcacaaccaaactaataatcaagccgatccagtaagaataggctccaaaatctgttagggaatcaaataccatagctactgggagtgtcaccccccagtaaccaaccaaaccaaggcaaaaaggaataacggtatccttatacccccgtaaaattccctggagcggtgctgcaaaggtatctgctaactggaagaaaagactataagtcaaaaagcgcgctgtcaaatcgataaattctgggtcgttaccataaagactagccacatttcccctaaaaatgtaaaggaaggttaaggtgaaggccgcaaaaacgagagctacacttcttccaatatgaataaattttttggcatcttggaaccgtttagctccaagttcataagatacaacaatcgccatagcggaagaaatactcataggaaaggcgtacatgagtgttgaaaaattcatagcagattgatgactggctataatgagcgatgaaaatttagccattaacaaaccaactacagagaaaacagctacttcagcaaaaactgttcctcctattggcaaaccaagtcggacaccttcctttattctttcaaaatcaagaggggtgattttggaaaactgatattcttttagcttcttattctttatcaaaatgaaaattgaaatggctagaaggcaccaataagctagagatgttcctaaaccagctcctgctcctcctaactcaggcaagccaaaaactccataaatcaagagatagttaaagccactatttaaaggaagcaacaaaagcatcagatacatggaaagttttgtcaagcccaaggaatctaacaaggaacggataacactaaaaagtaggagagggataattccgatcgctaaaaactgtaagtagtgtacagctactgctgctacctttggttctaagccaatatgattcaaaatcggtggggctaggaaaattaccaatccaaataagaagatagaaagtcctaaagctatataaataaactgataaaaatctgaagcaacttcttccttttttcctctacctaaattgtgtccaataatgggaatcatagcatagacgatacctgtcaaaaatgtgaaaaaagggttccataaactagttgctgtagagacaccagccaaatccatggtattgtattgaccagtcatagtggtatctacaaatgaagcggaataattggcaaattggtagatcataatcgggaagaatatcttaagaaataagataaacttgtctttaaaacgatgagttggatacataaaaagtctctattctttaacattatagagcaggattccaactagttttcatagacaatttgtcctttacagatggtatatttgacctgcccttttaaggtttcaccgataaatggtgaattggctgctttagaagcaaaatgtgaatcaacaagacggtcagccttggcatcaaaaatagtaatatcagcaggaccattttcagctaggtagcctgcttcaaagttatatagttttgctggattgtatgtcattttttcgagtaattccatcaaactcaactccccagcttccaccaaataagttaaacctagagaaagagatgtttccaaaccagtcataccagatggcgctttggtaatatcttcgacatttttttcatccgcatggtgaggcgcatggtcagtcgcgataactgtgatgacgcctgacttgagaccttcaatcaccgcacgacggtctgattccaagcgaagcggtggattcatcttagcattgctaccttgtgtcaaaagaagtgcttctgtcttagagaaatgctgtggcgctacttctgctgtgacttgcgcgcctagcccttgagcaaactcaactactttgacactttcttccttagacaaatgctgaatatggacatgagccttagttgcataggcaatcatgacatcacgcgccatcatagcgtactcagccaccccagtcgcaccgcagatatggaaatgttctttagcgatattttcattaaagccaagaacaccgttcaaacctggatcttcctcatgaagactaataaaggtattaagctttttagcttcctccatggcttccttgacaactttactgctctcaagcggaataccgtcatcagaaaaaccaacagctccagcttctaagagtgctttaaagtcagtcaaatcttgcccattaaaattcttagtaatggtcgcaaccgtcttaacattaatcttctctttggcagctgactggagaacttcttgcaaagtctccacgtctgaaatggttggactagtattagccatcatgacaaccgtggtaaaaccacctgcagcggctgctagggcaccagtatggatgtcttccttgtgggtctgaccaggttcacgaaaatgaacatggatatcaaccaagccaggagcaactacaagacctgtggcatccaggatttctgcgccttcttctttaatttcaggcgcaattttgataatctttccatcttcaaccaagacatcacacacttgatccaaaccagacttgggatccattacacgaccatttttgattagtagcatctgctttctcctttattcataaaaatcaacttgggtatccaacaatttatccccatcataaacaaacttagctgaaaagaagggtttgtcctctaaaagccactcaacaaaggtatggtcaccttcccaagtcggcttgctcaaaacctcatcataaggaacccattccagcgtcccctcattgcagtcaatcaaatccccctcgaactccgtcaccttaaaaacataggtgtaccagtctaaatctggtgtaaattcaggaaaagtgatgacaccttttagaactggcttggctttgagccctgtttcctcaaggatttcacgcgccgcgcattcctgaggtgtctctcctcgctctagcttaccacccacaccaatccattttccttcatgaacatcatttggcttcttattacggtggagcataagcagttctttcccgttatcaatgtagcaaatcgtcgctaactgaggcatattttctccttatctaagccaatcgattggctcttgtcctgtttcttttaagaatgcattggccttggaaaaaggcttggaaccccaaaatcctctataaactgacaaaggactgggatgggctgattcgataatcaagtgatgaggattggtaactaaggccttcttcttgcgtgcataagctccccagagtacaaaaacgacttgtctatctagatgattgaccacctgaatcacagcatccgtaaaaggctcccatatctgcccagcatgaccattagcccgtccagccggaactgtcaaacaagcattaagaagtaagactccttgctcagcccaagctgtcaaatcatgagatttcttaaccccgatatcatctgacaattctttcaagatattttgcaaggatggtggagctgggatagagtccggtacagaaaaactcaagccctgcgcttgacctggcccgtgatagggatcttgccctagaatcaccaccttaacttcttcaagcggtgttgtcaagagagcctgaaaaaccttttccttgggtggataaatagtcccctgagcatagacctgattcataaactgattgattttcccgaaataaccctcaggtaattgctccttaatcaaagcatgccaagacgaatgttccatagccgactccttcgtttttactgcctctattatagcaaaaagtggctttctaaaccactttttacagtttatctaagcaatccagcaagtcttggtaagaatggatttcgtaagtcggctgggcttgtgtgggattttcgaggtgatgaggattgtaccagatagtgtcaatccccgcattattgccaccttgaatatcggcggttagggaatctccaaacatcaacgtcttttctttactaaaacctgcaatctgttgaccaatcttttcataaaagagagcatcaggcttttgtgtttgcaattgttctgagataaagacttgattgaaataaggtgccagaccagattgagccaaacgtcccgtctgaatagcagtaatcccatttgtcgcagcatataagtcataatcacgctcgatgaggctatctaaaagttcatgagcacctgaaaaagcttgcccttgctgggataggtaaaactggtaacgttgggctagaaaactaccgtctttttcctgtccaaaatgagcaaataaacgagaaaagcgcgtgttaaccagctcttgtttactaattttcttttgctccaaatccttccagagagccttgttcatgggaacgtaaaagtctttgtaggcctgaatatctgcaaccccttcttcttttagaagttgcgtcaaagccacatcctcagcagcatcaaaatcaagaagagtgtggtcaaggtcgaaaagtagaaatttgtaggacaatttgagagttttcctttctaggtacttaatagattagtttatttcttctttttcttagttttattcatcaacataccaactacaactggagtaaccacactgccaacttgtccaacaactttaagtatcttttttgcttcatctatttttttgtttctacacgattcgcacttattgtgcttataacttgatggtaaatccctagtacatgtcttgcatttttttatttctttcattctagcacctctgtctcaatagaatctgttttatttggcaatttcattatagaagtttcaatttttggcaattcttttgtccagtaatttgtaggcgaaggatcaagtaaatcaagtctctctactaattcctgagaactgagataagtttcgttaataaatttcccaaagtaatccaaacttttttgagcagcttttttctcgcccaactcattataagctattgctgctgatagtgaaacgatatttacagctgctaatccatctcgaatctcattcatacgagcttcaattttatctggtttatccccttttaataacttaccccaagtagaatctggttgttctttgataaaatttacatttgatttttgactaagcattaagagatttctactatcttctgcatctgaaataacttgcagtaacatcattgttctaatatttggatctgatatctctctagcttgcaagagtttctgttgacaactataggctattgcaagtctatctgactcctgtccttttctgacgtcctcaatagcatattgtacattttgaatctcctctgcaatctgagccatttgaatttgtgacgaataatcagctaacgctttatttaattctggtgtcaatttaacagatttcaatggtacatttccaatgactttattagtattagtatctactaataccgccaagagagagccatctttcttggtcattaattttaacactccttgagcaattgcttcccgttgttctggagaaagaattgcctgaaaaacctcttcaggtatactagattggacaacattgataaaggctggagcagaatataacattttttctacttcagataagattttattagcatttttgactaaaggtttggctatttctggtaacttattaaaaaatgctgagggttttagttcatagccatcaatatcaagaatatcgaagtcatcttctccaaaaaataaaacttcatccataaattactacctcattatgtttaaattattagaaatattataccatattaaacaaaattatgattttgatttttctttaatattatttatccaatcatttttactggaatctaacatagaataatactatcctatacaattgacagctcaaatctttcagaatagaacaatcctaactatcgaatactctaacttcataaatatctatgcaattctagatctagaattcctataaactaaatgttttcgcactcttctaaaacattgattgccttaaattttaatttttgaaggattctaaagctagaatagtcccatcacaatcagttttgaattattatactcaatgaaaatcaaagagcaaactaggaaactagccgcaggctgtacttgagtacggcaaggcgacgttgacgtggtttgaatttgattttcgaagagtattaacaatttagaaacgctatgattccactccttttacattaaaaaggaactgcataaagcaatccctttctgattttgaaattatttacttaaaatttgatagttgagataatcaataactcacctataaaagaaatgataggatgattccttatttattgatttcaagctccgacaactgtgtttgaataactgacagttctgcaccagcctgaagaagagcagctgcagtataggcaccttctacaattggaaccctattgatcatgatacttttatcactgaaatcagccaccatttctaagttcattttagcagaacctaggtcaaaaaaagctaataaagtatctgctggattttcggaaacaaccctatctacttgatcaaaactcgttccaattcctccatcttcggttcctcctacataagtaatcggaatatctttagctacttcactaatcagttcaacgacaccttgtgcaatgtgtttagaatgtgaaacgataacaagaccaatacttcccattaaaccaccccagtttctaaaagagcagtaaagagtaatcctgatgaaaatgatccaggatcaatatgtccaagagaacgttctcctacataagatgcccttcctttagttgcaagtaaatctttggtagcattcactagcttatcaataacctcttgagtcaattggcctgcagacaaagcagcaataacaggagtccaaacgtcaaccattgtcttttctccaacttctgctttcccacgtttgacaatcatatccaaaccgctttgtaagatttcctctattttcgaatttgaatcagccttggccatgcccataaaagcagagccatacaagggaccagaagcaccgcctaccttgctcagtaattgcattgagacaagtttaaacacatcactgcttgtttcaaattgctttccttctaagttttccataactgcagccattccacgcgccatatttccaccgtggtctccatctcctataggggtgtctagctcactaaggtaatctttctgttcttgaatcttttcattaaaaagcttcatccattcaagagcttgttcaacattcatgcgacatatcctccttgagttttaccaagctggggtagtaacaggtgtatttagagcatccaaccactcatcatctgccaatcgaatcaatgttaatgataatccagccatatcgattgatgtcatatagtttccaattttcttaaatgccaactcaacacctttttcatggagtaatttagccacatcatttgcaaatacgtattgctccataagaggagtgcttcctaaaccattgatgagaaggccatagcgttctccagctttaagttggaaaccttcagataacttttcaaccaattctgaggccaattgtgctgagggttgcatcttctctttcttatatcccggttcaccgtggataccaactccgtattcaaattcatcatcttctagaacaaaacctggtttgccaacttctggaacagtagcgccagatagagctaagccaattgttttaatttctaagacaagtttgtcggccaagtccttcatttcagataatgttttaccagaacgagccgcatcacccaaaattttatggactaatatagtacctgcgacacctcgacgaccttgggtatagagactattttcaaccgcaatatcatcatcgactacaacacttgctacatcaataccttccatttcagcaagttcttgtgcaatttcaaaattcatgatgtccccagaatagttcttgatgaccatgaaaactccagcaccttcatcagccgccttgatggcttctaaaatttggtccggagtaggtgaagtgaagactgctccacaaatggcagcagacaacattccatctcctacaaatccagcatgacttggttcatgtcctgaacctccacctgaaatgagtccaacttttcctgtcttttctgcctttctaacgatgacatcaaaaccatctaagcgttctaccaagtcatcatgcatgaatgacaatccctgcaacatttcatcaacaacttgtgtcggttcatttataatttttttcatgagaaactcctttcggcatgtatctttgttttcgctttcattatatattttttattgctagatgataagggacagattctattatttgtccccttttaaacccgtttaaaacatttttttggtaaaatgaagtaagtaaaagaaaggcttcctatggcatcatcacttattacaaaaaaacggattaccaaggcatttagagaccttttagctactagagaatttgacaaaatctccattgtagatatcatggaatcagctggcattcgtagacagaccttttataatcactttcttgacaaatatgaactgctagactggatatttgaaaatgacttaaccgagtatatcaccaataacttggacttcattcagggccaaaaactattacaagaattatttttttatttcgaacaagagcgtgatttttatattcaactttttgatattcaagggcaaaataacttctatgaccactttatcagctactgtcgcttgcttgtatcaaaaattttaagagaatatggtcagattgatatcgattcatctgcttatacttgttttttgttagactatcattcacacgctctagcagaaatcgtgaaagcttacgtcaataaaaaaagtccagttccacaaccagactttctaatcatgacaattattggaaagagaccacaatgacatttatttcaaatcataaacaaaaaattatttcaagttacatttcggcaactgtcagcagtcatcctgaattagaaaaacaccctactttaccactagtctatcaaaaaaatcgcaatcctcatcaggttccaatattgtcgggtggaggttccggtcacgaacctgcgcatattggatatgtgggagaaggaatgcttactgctgctatctatggccaattatttactcctcctacaagaactgaaatcttagagtccattcgttttttaaacaatggtcacggtgtcttcatcattgtaaaaaatttcgaagcagacaccaaagaatttagctgggccattaacactgctagaaaagaaggaattaaggtcggctatagtctagcacacgacgatatttcaattgaacctcacaatagatttcaaattagaggaagagggcttgcagggacaatcttacttcataaaatcctaggatttgcagctcaaaatggtgccaacatcgagcaactaactgatttaggtcatcagcttgctcccgaaatcgcaacaattggctttgcaacgaaagctgctagtctcccccaagccacccttccactatttaacttggaagaaggaaatatttcctatggtattgggatacatggcgaagaaggctatcgtatcgtcccattccaatcatcggaaatccttgcaaatgaaattataagtaaattaagattgcactatcattggaaaaagggtgatcaatttatattgcttgtaaataatctaggcactaccagcaacttagaaatgggcatatttatcaatgatatccttcaactcttagaaattgaaggagtcactattacctttataaaatcaggaacatttatgaccagtctagatatggcaggtatatccgtaactctttgccccgtaaaaaataaacagtggttagaagcgctcaatgctccaacgacagcttttgcatggtaatttgcttgtataactcaaaagggctacatcacttgatggccctttgtttttatcttacgtttaaaagaactcattcttgacatttcaaataggccatctatcccttacaattcttccgatgagctttgagttttttcagagcccaatcatagtggcttgacgtactactgacaaagtaggaacctagacttgtccctcccgtccacttatagatacctttggtaaagagttcatcattgctaaaaacttctatcaactctaaaacctccctatgtgattgttctaggagtctagtcgcttcttctaaggaggttttctggtgcttcttccaaaaagcgatattcatttctccataagttttccaattataaggttcaggtagaaaaggcctttcgtgaccttcttgattagaatgtacccaagtcaaaagtaactgatgccattcataaagatggatcagaacatctcttagatttttatcccttttccagtgagcttcttttttctttgggtctcttgaaaaatcaaatggagtctgtagctcatcttcacttagttgggagatgaaacgattgagcttttcatagttttccttagaggccagtactagctcctcttttgttttcggtctaggcacagagttctcccttcatattgttagttattattagaaattttttatcctttaaatctctataacttatcctttaatttctcaacaaagagataggctgctggacaggtcaaagtattcttaatcgtcaaatggttgatttgatggatctttttgcgatctgtatgggggaactctcggcaggccttgggacgaacatcatagatggaacagagattatctcctcctagaaagggacaaggcatggatttaaaaaccttatcgccatctgcatctacctgaaggaactccgcttcaaaagctggtaatttcatcttaaaatacttggcgattcgtgtaatatccgcttctttaaagtccggtcccaatgtcttacaacagttggcacaggcagtgcaatcaatctcctcaaaaacttcttggtgtatctgctgggctatcttgtctaggtttttaggaggttttttctttagattggctaaaactttacggtgttccttctgcttttgcaaggctagctggtggtaatactcaatatcaatttctttagacatgatttctctcttattctatttgtttctcctattatatcatgcctcttcatcattgaaaagtggacttcacaagactatactattcccaaatgtatcaaaaaaccttgcaactaggttacaaggttaatgacattaatcgaagttaacgtattctttttgaagttcaaggacttcttccattgttgaacactctgtaagggcacggttagcgtactcttccatcttagcagtgtccaatttcttcatcaagctacgtgtacgaaggactgatgttgctgacatagagaactcatccaagcccattccgacaagaagtggaacagcttttttggtcaccagccatctcaccacacataccagcccatttaccttcagcgtgagctgccttgataacgttgttgatcaagcgaaggattgatgggttatatggttggtaaaggtatgaaacttgctcgttcatacggtctgctgccattgagtattggatcaagtcgtttgttccaattgacatgaagtctacttcttttgcaaattggtctgcaagcatcgctgctgcagggatttcaatcatgataccaacttggatatcatccgcaactgcaacaccttcagcaagaaggtttgccttttcttcttcataaactgctttggctgcacggaattctttcaaaagagcaaccattgggaacatgatacgcaattgaccatgaacagaagcacgaagaagagcacggatttgtgtacggaacattgcatctccagtttcagaaatagagatacgaagggcacggaatccaaggaatgggttcatttcatgtggcatatcgaagtaaggaagttccttatctccaccaatatccattgtacgaacaaccactggtttaccattcattccctcaagaacagccttgtatgcttcatactgctcatcttcagttgggaagtcttgagaatccatgtacaagaactctgtacggtaaagtccaaccgcttctgcaccgttgttgttaacaccttcaacgtcttttggagtaccgatgttagcagccaactcgaagtgtttaccgtcagcagtcactgtttgagcatctttcaaaagggcccattcagctttttgtttagcataagcttcaccagctgctttaaattctgccgcttgttcatctgttgggttgataatcacttcaccagtaattccgttaacggcaaggatatcaccgtctttcactacttcagtgatgttatttgttcccaatacagctgcaatttcaagtgtacgtgccatgatagctgagtggcttgtacgtccaccgatatttgttacaaaagcttttacaaagtttttgtccaattgagctgtatcagatggtgtcaagtcatgcgcaatcacaattacttcttcattgatagaagctgggtttggcaatttcttaccaagaaggtttgccaatacacgttttgtcacgtcgcggatatccgctgcacgttcttgcatatatgggttgtcttccatgccttcaaagatagtgatgaacatgtcagtcacttctttaagacctgcttctgcattgactttcttagcacggattgtttctttaatctgaccaatcaattctgggtcagcaagaaccatcaaatgagcgtcaaaaacttgagccgcttcttcaccaagcgtacctacagctttctcacggataagagaaagctcgttttgagaagcttcaagagctacatccaaacgagcctcttctgcgtttgtatcttcgactgaaacagtctcgaatgacaaatccggttgaacgagtagatatgcttttgcaactgcaacaccgtcagatgctgcgattcctttaagcatttctgtcattttccttatgccaatccttctttttccattgtttctgagattgcagcgatagcgtcatctgcatctgcaccttcagctgagatagttacatcagcaccttggccaacaccaagactcataacacccatgattgatttaaggttaactgatttacctttgtactcaagagtgatatctgaagcaaatttgcttgcagtttgtaccaacaatgttgctggacgtgcgtgaatacctgtttctgccactacgtggaaatctttagaagccatagtttgactctccttttgttctttcttttttgagttatatgtgataacccttacaatttggtattatatcatcttctaggatttttttcaagcattttatgggatttattcgatttcctttcagataacttgctgaaaatcttctattctagataacaaaacacaggatatagttttccaaaaaactacttctaggataattatcactatttcataaaacaaacactacatattgtgttttgcaacctttagtagaaaaatagaccactatatttagtttcaaatcattgacaaaaatttattttctgatatactaagaaagtaatctattttgaaagaggagttacacaatggtaaccgtttattctaaaaacaactgtgtccaatgtaagatgactaaacgtttcttggacagtaataatgtcgcttatcgtgaaatcaatcttgatgagcaacctgagtacatcgatcaagttaaagagctcggtttcagcgcagctcctgttatccaaacaccaactgaagtcttttcaggtttccaaccaggaaaactgaaacaattagcataatcttagtacatcatccagaagaaactgcttctagggctaacttagaagcctttcttttgtaattagataagggaaattttatgggattaaaacatcttgaagacgtgacttacttccgtctcaataacgaaatcaaccgtcctgtcaatggacaaatcatgcttcataaagataaggaagccttggatgccttctttaaagaaaatgtagttccaaacactatggtttttgattcaatcaaagataaaatcaactacctcattgaacacaactacatcgaaacagcctttatcaagaaataccgtccagagtttttggaagaattgtctcaatttatcaaagaccaaaacttccaattcaagtctttcatggcagcttataaattttacaatcaatatgctttgaaaactaacgacggtgaatattatcttgaaagcatggaagaccgcgtcttctttaacgccctttatttcgctgatgggaatgaagctattgccatcgatattgccaatgaaatcatccaccaacgctaccaaccagctactccttccttcttgaatgctggacgtgctcgtcgtggagaattagtatcatgtttcctgatccaagtaactgatgatatgaactctatcggacgttctatcaactcagctcttcaactttcacgtatcggtggtggtgtgggaattaccctcagcaaccttcgtgaagctggtgcacctatcaaaggctatgaaggagcagcttctggggtcgttccagttatgaaacttttcgaagatagcttctcttactcaaaccaattgggtcaacgtcaaggtgccggtgttgtctacctcaacgtcttccacccagatattatcgccttcctttcaactaagaaagaaaacgccgatgaaaaagttcgtgtaaagaccctttcacttggtgttgtagtacccgataaattctacgaattagcacgtaaaaatgaagaaatgtacctcttcagcccatactctgtagaacttgaatacggtgtgccatttaactacatcgacatcactgaaaaatacgatgaattggtcgcaaatccaaacatccgcaaaacaaaaatcaaagcgcgtgatttggaaactgaaatctctaaattgcaacaagagtctggttacccttatgtcgtcaacattgatacggctaaccgtgcaaatcctgttgatggtaagattatcatgagtaacttgtgttctgagattcttcaagttcaagaaccaagcttgatcaacgatgctcaagaattccttcaaatgggaacagatgtttcatgtaaccttggttcaaccaacgtggtcaacatgatgacctcacctgattttggtcgttctatccgtgctatggttcgtgcccttactttcgttacagatagttcgcacatcgtagctgttcctactatcgaccatggaaatagccaagcccacacctttggtctcggtgccatgggacttcacagctaccttgcccaacaattgattgaatatggatcgcctgagtctgttgaatttacaagcatctacttcatgctcatgaactactggaccttggtagaatcaaacaatatcgcgcgtgaacgtggtatcaccttccacaactttgaaaaatcagactatgctaacggaagctactttgacaaatatgtgactggcgagtttgttccaaaatcagaccgtgttaaagaactcttcaaagatgtctttatcccaagtgctgctgactgggctgaacttcgcgaacaggttcaagcagatggtctttaccaccaaaaccgccttgctgtagcgccaaatggttctatcagttacatcaacgacgtttctgcttctatccacccgattacgcaacgtatcgaagaacgtcaagaaaagaaaatcggtaaaatctactatcctgctgctggcttgtcaacagaaaccattccttactacacttctgcctacgacatggatatgcgtaaggtgattgatgtctatgctgctgcaactgagcacgtggaccaaggactatcactcaccctcttcatgcgtagtgacattccaaaaggtctttacgaatggaagaaagaaaacaaacaaacgacacgtgacttgtcaatccttcgtaactatgcctttaacaagggtatcaagtctatctactacgtccgtacctttacagatgatggtggagaagtcggtgccaaccaatgtgaaagctgtgtgatttaatctttccttgagaaaactactttttctcagataagtgattcattcaccctgctaaactagaataagcatctatactatgaaataacaaaaagtcgggcttccgactttttgtgcgatactcctctagaattatgataaaatagaagtaattgtgagttcgcaatactaaacacagaaagagatttcaaaatggaaacttactacaaagccattaactggaatgccatcgaagatgtcatcgacaaatcaacttgggaaaaactgacggagcaattctggcttgatacacgtattcctttgtcaaatgacttggatgactggagaaagctatcaaatgtagaaaaagacttggttggaaaagtctttggtggtttaacccttctcgacactatgcaatctgaaactggggttcaagcccttcgcgcagacatccgtacaccacatgaggaagctgttttcaataacatccaatttatggaatctgtccacgcaaaatcttactcatcaatcttttctaccttgaatactaaggctgagattgaagaaattttcgaatggaccaataccaatccttacctacaaaagaaggctgagattgtcaacgaaatctacctaaacggtagcccacttgaaaagaaagttgctagtgtcttccttgaaaccttcctcttctactcaggtttcttcactcccctctactatctcggtaacaacaaactggccaacgtcgctgaaatcattaaattgattattcgtgatgaatctgttcacggaacctacattggttataaattccaacttggtttcaatgaattacctgaagaagagcaagaaaaactcaaagaatggatgtacgatctgctatacactctctacgagaatgaagaaggttatacagagagcctctatgacggtgttggttggactgaagaagtcaaaaccttccttcgctacaatgctaacaaggcactcatgaacctgggacaagatccactcttcccagattcagctgatgatgtcaacccaatcgttatgaacggtatttcaacaggaacttctaaccacgacttcttctctcaagtcggaaatggttaccttcttggtgaagttgaagctatgcaagacgatgactacaactacggtttggactaattcaattatcccagaactgataacaaatatcatggcttgtttaaaacaaccatgatatttttgtttttgttttcttttgttttttaaattgattgattgaatactttatgataaaatagtaatagaaatagaggtgataacgatgttaaagcaagaaaaactagataatattctagaaacggtaaatacaaagggaactattactgtaaaagaaatcatgactcgcttggatgtgtcagatatgactgctagacgctacttgcaagagttggcagacaaggatctacttgttcgagtacacgggggagctgagaaaattcgcacaggttctattttaaataatgaacgttccaatattgaaaaacaaagcttacaaatcgcagaaaaacaagaaattagccgttttgcaggccatttaattgatgagggtgaaactatttttatcggccctggtacgaccttagaatcttttgcccgtgaacttccaattgataatattcgtgttgtaacaaacagtttaccagtctttctcatcttaaacgaacgaaaactaacagatttgattttaatcggtggaaactaccgctctatcactggagcctttgtgggaacactaaccttgcaaaacttagccaatcttcaattttctaaagctttcgttagctgtaatggtattcaggacaatgcgattgcgacctttagtgaagaggaaggtgaatctcaacgcatcgccctcaataattccaataaaaaatacttactagctgaccatagtaagttcaataaatttgatttctataccttctacaatatctctgatattgatatcatcgtttcagattctaaactgagcaaagaaacgtttgaacaactttcaaaacaaacaaaaattaattctttctaaaccataaaactgaggattgataaaaaataaaaatgcgtcatatcaagaaaataagaatcttgatatgacgcatttttggatgaagatttttacaaggagtttcctagattatttatgattgttgaaacggcataaaatctgaatcaaaggagatattatcccgttcttcaggactgataaaatttaaaaagatatttttaaattcttccagctcatagtctgaatggcaaatccattctttaccggtagagacataccatttcccaaaatttttcagctcctcattagtcaaacaaggtatttgaaaacatttatcaaaattgataatataaactttttcataaatagattggataaaatctttgaacatcttttgcctcactagaattctatatctaattactcattctactagtctataatctgactttctgctactttcttgtaccagtgagctgatttcttaggataacgttcttgagtttcaaagtctacatagaagagaccgtaacgtttttcataaccgtttgaccatgagaagacgtccatcaatgaccagatgaagtatcctttgacgtttgcaccatcagcaatcgcatcagataagacctctaagtgttgtttgacataatcaatacggccatcatcataaacagtattgtctacaaactcatctttataaccaagtccattttcagtgatgtaaatcttcttatagttcggataatctttcttcacgcgcatgatttggtcatacaaaccttgagggtagataatccaatcccaatccgtacgtggtacatagtcaggagctacacgacgaccaacacctttgatttggtatttagagcttcctttctcacccttaccattatggataatttcagtttctccatcaaaggcttccatccagtcactcatataatagttgatgcctagaaaatcattcaagtctttcgcagcttctaatgctgtgaaatcttcttcacgaagatccaagctaccaccattgactgataagatatggttgacgccttccatcgtttcagctgaatagtgacctagataagttgcatccaagataaatttattgtggatgatatcttccaactcagctgcacgaacatctgctggatttttaggatctaaaggatacttggttggcagtgcgtgaacaacaccaatttcacctttataacctttatctttatatagcttaactgcacgcgcatgagaaaccatcatattgtggtgcgattggaaaactttggcaaggtcgtactgaatacctggagggaattttccaaccaagtattgaccatcaccaattggcccaatttcattaaaggttgtccaatagtttacttctgggaattcttcaaaacagaaggcagcgtagtctacaaagtgttcaatattttcacggtttaagaagtctccatttgagtggagagcttctggcgtatcaaagtgatgaagagttacaaaaggctcaacatgacgtttgtgacactctgcaaatagattatgataaaattcaacacctttagcatttacttgaccgtaaccagtcgggaaaatacgtgaccaggcaatagaaattcgaataccattgacaccatactcttctgctagcttgaggtcaactgggtatcgattgtaaaaatcactggctggttcggcagtgtaccagtagttatcttcaagatacttatcccacgcaactggtcctttaccatcagtatgtgtagcaccttctgcttgataggcagctgttgcgccaccgaaaataaagtcttttggtaatgtttttgtcatttttttcacctatttcttgatttaaataaagtaaaagtgagaggagaggagtcagtgagccatccttctccatctcacttcttgtaccaagtcaccgaattgtaacatgaggaggtaaaaacgatagcttttaccgacgaattaataaggcgattaggaaattcgccatagcgattgccgtaacgataggagactgtttcacagtccctatcgttaatcgaattgagcttgtacgaatgcaagagcaccttttccatcacgtagttaatttgatgtattgagcgccttctgttttcgctagtttaataccgagcttatctgtttctgctttcatgtcttcaaagtttgaagcaacttgaggggcaaggataacaagatcaaactctggcaacatttcacggtgagcaccatagccacctgctgctgctttcacaggaacattgtattctgcagctgccttattcaaagcattcgcaagaagtccacttgtccctccacctgcacagagaacgaggacatttgtttcttcagtgattgtattttgtgctgcttctacaccagctttttcaagaatagcatctgcttttgcagtgttgaagtttgcggcaactttttctttcaattcatcattagatttacctgaacgctcttcttcaagaatttgttcatcatatactttaaggaatggatagtaaatgactacgtcaaccacgattagaagggcagcaagaatgaatgatagaacttggaagttcgtaccaagaactagacctagtggagctggagttgtccatggtagattagcagtaaatgagttcattccaagtgtttcaataaagaatttgaagatccaaacgtttgcgattggagcaaagataaatggaatgaagaagattgggtttaatacaagtggtgcaccaaacaagattggttcatttacaccaaagaatgttgggactactgaagcacgaccgattgcacggttacgtttagattttgttaaccacatgaacatgaatggaacaaccagtgtcgcaccagtaccacccatggtaacgataaacatttgtgtaccagaagtaagaatcttgtcagcgtgcataccttgttggagaaggttcaagttgacttcggcattggcataggtaatagctgcgatagctggttcaacgatagatggaccatggataccaacaaaccagaagaaagcaaaggcaccaaagataatcgtaatacctagataaccatcagcagcagagaataatggtgcaaagaatttaccgattgattcagctacgcttgcaccaacaaaatgacgagctagtaaatcaagagcataaagagaaacaactgatagagtgaatggaatcacatctttaaaaacttgtgagatattaggtggaacttcgtcaggcatacgaatagtgacgttgttcttaacacaaaccttatagatggctacagtaacaaaggcagcaaggaaggctgaaagcaaaccttttgtccccaagaatccagtagctaggccattttcgataggatcagctgccaacatcaacaaaccaacaatcgctgctaacagtgttgacatatagttgatttgattggttttctccatgctacggtttactgagtcagtcaatgacttagctgttgtaccagctaccaagagagccagaatacccatagaatagctataaggtttcatcagaaaggctacaacttcatcagaccatttaaagccccatgagtttggtacaaaggcaatcaagataaaaatacttgagaagagaataacaggcatacctgcaatgaaaccatcacgaatggcacgaaggtagatattacgagatagtttctcaaagaaaggctttcctttctcaataaatgcaattaatttattcattacttaactcctctcttgtagagttcaattaaatggtgcatcaaatcttttaataagatagttgtcatcaagtggtcttggccatgcatcatggttacactataggctaagtcctcacctgaagcttccttagccaatagacttgtttgcgcgtggtgagcctctgcaatgcaagaaccagcttcctcgactaagctatctgctttcgcaaaatcgccagcttcagcagctttcaaggcttccaatagttttgaacgagcatcgccagcataggctacgatttcaaaacctaacaatgttacttcttctctattcatgatagaattctccttaggtatttttaattaaatttttatgacaataaacgttggatatgtagaactagataaactcgttcacttttatacaaatcaagacccgtatgttgcgtaatcacatcatagatcttggaaccaatctcgaacgcttttggataggattgtttaatatgatcttccatatccagaagtgattggttatcatctctagatctgtctaaataatccaagaaataattcaaatgtatcataaaacgatcatagaaatgattattctctttggttcgttgaattgcatagtccgttaaaacttcttcaacattcctgagaatttctttcctcttatcaatcgactccacaagttccacttcattttcaccttcggcatttaatgaaatgataagcaatccgaataatttcgtcctcaggaaaatgatctgctagcttctgacgataaatttcaaaagcttcatttgcgatttgaaaagcgacaggatacttagtggaaatatctggtagattactatccttgtaccttccttgtgctagagcttggtaagaacagtaaatatgatctgtcaaggttacgtagagatactcttgaattggataatgatatttctttgatagcttatcaatgatttcataggtcactgtgataaaatcaagcggaacatctttgaggagagccataaagttttctcttgactcttctgtcttcatccgaaagattttctcaatatgctgttcagtaatcaaatctcccttcctctttccaaatgtaatccccttaccaatcacaatcacttcttctcctttatcatttctgacaagcgagacattgtgattcattggatttagaattcgatacatgtcaacctccttttatatcttaaaggtatatgagtacaaaaaatgaccacaaatgaactagaaaatcagccgatttctaattcacctgtgatcatgcctaatattacttagtaacactcaccttgtattaacttgtgatttaagtatagcacaagtaagttattttgtaaacctttacataaaactttttttaaaatttttttagattcatgttcctaacctaggaggacttgcttacacgcgttctttccatgaagtcgctgttgtttgaagaactttattgagctcatcaatgttttcaaaaccagttgtgcgaagccattcgcgagctgctgcttcaccatctttgatgtatgcttcaactgatccagcccatgtagcacggccacaaagaactccgttaaagtttgcacctgattcatgagcaaatacaagagtatcttggaaaagtttagctgatacaccagcactcaagtagatgtaaggcaagttagttgcttcatcttgagctttgaagaaggctgctgcttcttcacgtgtataaactacttcaccttcagcgaagccttcaacatatttaatgttaacaggaacttctactttcaagacatcaatgttaaagcgtgggtctgagaagactttcatagcaccgataactttgtgtggttttactttcgcgtattctacagaaccagcgtctgcaattttttcatcataagcaaggatttcaaggaagaatgggatatcttcagccacacattcagaaccgatacgttcgatgtaagcttgtttttcttggttaagttcgtctgagctatctacatcatagtaaagcaagaatttaactgcatctgcaccttcttctttaatacgttttgcagaccaaacatccaagcagtctggcaaacgttttgtgcttgttgtatcataacctgttttttcataagcaaggagaagaccagcttttggatcaagagcttttgtagctggaagtccatattcagggtcaagaagcattgatgaagcgtatttagtcaattcatctgctaccaagactttaagttcttccatttgagccactgttggttcttctgtttggtgttgagccattaggcgtttcaaagcaccacgttggtcaaatgcaagagctgagatgattccattttcatcagaaagtttttctaagcgtgcacgtttttgttctgttaaagccattttatacctcttttactattaattgatcatatagagcttgatagttggccatgttgacatgaccagtcattttttcttgagcattgagcataccaaggacatttgccttgatgagtaattctgcatccgattctttatgaagtaaacctgaagaaattccagcaactgtagaatctccagatccaacagggttgactacctgaattctaggaatatctaccttgtagaaagtgtcaccatgtttggcaaaggcaccgttggcaccaagcgaaacaataatccattcaatccctgcaaacaaaggttcttgaaggacttcttttaattcatgcaaatcctcagaaacttctcttccaagaagctgagataattcctcattatttggtttgatgactgttggtttatgtggtgattcaagaaccgcctgaagtgctacaccagagcagtccaagacaacgggcttgccagcttgattagcaagttctaccaagctcgcatagtaatcaactggaaggccagctggcagactacctgagatagctactacttcaactgacttcaagagttttttgaaatgttccaaaaagtcttgaccttcttgttcaagaacttcaggtcctttttcaagaacttctgtttggttgtcaccgtggagaatagcaatacagttacgagtttctccctgaattgagaagaaatctttctttacttgatcatcgatattttcaaccaaaaactcaccaagtttgccacccactaaaccagtagcaagaacagaatccccaaattctgaaagtactcgggtaacattgagtcccttaccaccagccgttttggttacatccaccacacgattgacagtatcaatcttcaactcatccaaaggataggaaatatcgatggatgggttcattgtgactgttaaaatcataggtcacctcttagtcgtggtattctccgcgatcccatttttcaaggaattcagtgaagaagtttgcgtctgtttgttgagcattgtgactttcaaggtgttcaattttcgcaatcaattttttgttttcttcagatggtttgtattcagcatggatgaaagcttcgatgatatcacacatgagcaattcaccagtaatcttaccaccaaaaccgataacgttagcgttcaattgctctttagcataaagagctgttgtcatatcacgaaccaaggcagaacggacacctggaactttatttacagcattgttgataccaacaccagtaccacagatacataccccaagatcagcttgaccgctagttacagcttcccctacttttttaccaaagattgggtagtgagtacgtgtatggtcatatgtaccaaagtcaatgacttcatatccttttgatttcaaaaattctgaaaccgccattttttcatctgttacgatgtggtcacatccaattgcaattctcattagttattccctccgattaattatataaatctaatatcatttatccttactcaagaaaaatcaagattagcttaggaagcgagctgcgagcataactgaggttagctaaagtgagctgacgacagattatcttgatttttgaagcgtattagcacattttgttcaacatatcgaccctgatttggtgacgtccaccatcgtatttaccgttaacaaatcctttagcgatgtttttagccaattcatcaccaacaagttgtgcacccatagtgatcatacgtgagttgttgtgaccacgagtcatataagctgaacgttcgtcagatacttctgcagcaaccattcctttgatcttagttgcgaccataaatggaccagctccataagcatcaatcacgataccaaggttttgttcttctttgtttacttctgcagcaacagcaagagtcacatcaacaaagtcttgaccttcagctgtaacatccacaacgtggaagttttctttttccaagaagtctttcacaacttctttcaatctcaaacctgcagcatctgcaccgataacaatagacatattgtatactccttttatttttctaggctagtaaaaacttttatggttagcagtttacctacaaaaagttttctagcagtttattgacaaattggattgaatgagatgaatgacaccttattcaagtttaggaaatcagtttcctagaaataatctttctctacgaaagagaatataacaagtgattgtttgtttgtgacaaacatcatttgttgcttacaaacataatatactcctatttacttaaaaaagtcaacaattaatgtttgtttttgtgtttttttaattaaaaaatttcgatatcaaaaccaatttgatccacttgaccaggttctaggagacgaacattcttcttatcttctagatgatctccttcttcaagggatgttgacaagccagaccagggttcaaaagcaatgaaaggacctttattcaaagttgaccagataatgagatttggaaactctgcaaagttcactttcaatcccttatcatgtttacgagaacgaagggcaattgttctagattgcaattcatctaaggtgactgcatcagtgctgaaaagatcatagctgaggtctaattctttttgaccttctagccatggacttctatcttgaaaatcaagcatacctgtttctgggaaaggacgtggaacagagcaagtctcttctttttcaaactctagataataatcttcatagacttcatcatcaagcagaggacaattaaatcctggatgtccaccaataaagtaaggcatgaccttgctaatttctttattaaatattttgtattgagtccgcactgtctttccagtaaggatataagtgatttctaagcggaaatgataagggtagttctgatagctattctcatcgtcttcaattgcaaaagttacactattatctgtctgttcaactaattcaaattctttcttacgaaccaaaccatgacgaggaatctttcctttgatttcttgtccattatcatctatataaagtgctgtatcctctctcaatgaaccacaaatggggaagagaacaggagcttgtccactccaataagtagcatctccttgccacaaatactcaactccctcggcatcttttatagaagaaagagccccaccaaaactgttaaattcaactcttaattgttctgattttaattcaattaccatgattttctccgatttcttgatagtttataaaaaactaggttgtcactcctaatggtatgacaacctagtttcaacaatttacattttataggagcgcattattttgcttttgctgcgtactcttcgttacgtttaatcatttgttttctgtaccatgcaaagataccgatatagaatacaaggaagactactgcaccaaggattgctttgatatcaccagttgtagtgttaccaattgaccaaccaagaagtttttcgattggtccttcaagagttgagtgagtgatcaattgagtttggctcacaccttctgggaaggcacctacacctttagcaagttctgttgcaaatggtgcgataagcgtacctgaaagaaggaagagtggcaacaagagtgttccgaagataatcatacggagcaatttaccacgtgttacaaccaagagagctggagtaacacccatagcgataatacctgcaagtggcaagataccatttccgacgtttgaaagaagcactgcttcaaccaacatgattggtgcaagtacgttggcacaagcccagatttcagcacgaccagcgatgaatggccagtcaagaccgatgttgaatttacgtccttgaagacgtttagtagcaacgtttgtaataccttgtgaaagtggttctacggcggcgatgaaccaagaaccgattagtgagaagagttccaaagatacaccggctgtcaaaccaagagacaaccaacctttgataacaagttcccatttatcagcgccttcaacacctgcaactggatgtggagtacccatcaaaccgataacgataccaaggatgaaaccgatgaagaatttagaaccccagaaaccgattttcttgttcaatttagcagcgtcaaagtcgtatttatcaagacctgggaaaagtttttcaaaaatcttatccaaaaccatgataactgggttcatcatgtagttcatgtgagttgaagtcattggtgatgaacttggtgcattaagaaggtcatcaaatgtaggtttcatcaagtcagagttgatgattttaagaaccccaacaagaacaactgctgcagtcgcgataaagagtgaaactccttggctaacgccattgttgtctgcataccatttaatcaaaagacctgtgatagacaagtgccagatatcgaagatatcaacgtcaagtgtatcagttttcttcatagcaagcatcactacgttgacaatcaacatgatgagcaagaagtaaagtgtccaagcagagccccaagtgattgtagcgagtggtgcccaaccaacgtcggtgatgttcaattgaataccagtattctcaacgaattttgcaagtgatgctgagaaagcaccatttagcataccgatgatggcaccgataccagtaagagcgatggcaagtttgataccaccttcaagcgctttggagaatttcactccaaaaagtagagccaatactgtcaaaatgatcagcatgatgattggcccacccatatccaagataggtttgaacagcttattggctagttcgataatgacatccataatagttcctccctttttatagttatatgaatgttaacaaattaaaattagcttaacccgtgttctttgatagctgcttcaatattatcaaatactggagcactcattgctgggatacggaataagattggtccagcttcgataactggaatacctgggtcaaaaccaagatctgttgcagcaattggtgtaaaaatgtcataacctttgataaggtcttcattaacgtcttttaccataactgcatcacagtgaacatcaaaaccgcggtttgaaagttcttcttcaagagcacttttaatttggtggcttgagttaacacctgcaccgcaggcagcaagaattttaatcatatggatttcctccgatttaatatttttaatagacaaaattaagcaattgcttcagcaatataagcatagagggcttctggttcagaaatttttgataggtcttcaagatgactatttccagtaaagaagtccatcaactgagcaagaatgttcgtttgacttgaacttgagttattaatgataaagaagagcaaggatacttctacttccttatctggcgcaatcatattgtggaaagtcactggtttttctaatcgaacgaccacaactttttcggctagattatgaacaatatctgtgtgaggaatagccacattcggcaaatccttacccaaaaattccatatctaggccagttggaaatgacttttcacgcgtgatcaaggcttcacgataagttggagttacgatttctcgttcttccaataaagtagcaacctgatcaaagagatgttcttgattatccgcttctaagcaaaacacaaggtttttgtcaaagaaatgatctaatcccataaggttttcccttctttccattaactttatgctataagtataacactatatgaaatcgttgtcaataattttttgttgttttttgtccttttttcaattattttgtttatttttatatttacaaccaaaaacaaacatttaaaacaaacactttaaacgatttaatcctattataaatgcaaaaaaacaggcctatttaagcctgttttactattgattcttatgtaagtttcctgtgaacaagaaaaacaattatgataacttattcttcatccatgctcaagacgctaaggaaggcttcttgtggaacttctactgatccgatagctttcatgcgtttcttaccagctttttgtttttcaagcagtttacgcttacgagaaacgtcaccaccataacatttagcaagtacgttcttacgaagggccttgatatcagtacgagcgacaatcttctgtccaatagctgcttgaattggcacctcaaattgttggcgagggatgattttcttaagcttatcaacgatgagttttccgcgttcgtaggcaaagtccttgtgaacgataaagctaagggcatccaccttgtctccattgagaaggatgtccattttgaccagcttagaggggcgatactctgacaattcgtagtcaaagcttgcataaccacgtgttgaagacttaagcttatcaaagaaatcaaagacgatttcagccagtggaatttgatagataacattgacacggttatcatcaatatagtccatagtcacaaagtcaccacgcttgcgctgagctagctccattacagctcctacgaactcctgtggtaccatgatttgcgccttaacataaggctcttcaatggtcgcaatcttggtaggatctgggaactcagatgggttagacacatccatagactcaccgtcggtcaaattaactttgtaaataacagacggagctgtcatgatgaggtcgatattaaactcacgttccaaacgttcttggataacatccatatggagaagtccaaggaaaccacaacggaaaccaaatccaagtgcctgagatgtttctggttcaaactgaagactagcatcattcagttgtaatttttcaagggcttcacgcaggtcattgtacttgtttgactcgataggatagagacccgcaaagaccataggattcatctgtttgtaaccatgtaatggctctgccgcaggattggttgccaaggtaacggtatcacccacacgagtgtcttgaaccgtcttgatagaagccgcaatataaccaacgtcaccagtcgcaaggaaatcacgaccaactgctttgggagtaaaaataccaacttctgtcacatcaaaggtcttaccattgctcataagctgaatcttatcaccaggtttgacaaccccatccatgacacgaacttggaggataaccccacggtaagcatcgtaaacagaatcgaaaatcaaggccttaagtggtgccgtcacatcacctgttggtgctggtactttttctacgatttgctcgaggatttcttcaatcccaataccagccttggcagaagccaaaactgcttcactggcatccaaaccaatgacatcttcaatctctgtacgcacgcgctcaggatctgcagcaggtaggtcaattttgttaatgactggcatgatttccaaatcattgtccaaggctagataaacgttggcaagggtttgagcctcaataccttgagcggcatcgaccaccaaaatagcaccctcacaggcagcgagcgaacgtgaaacttcataagtgaagtctacgtgccccggcgtgtcaatcaagtggaaaatataagtttcgccatcttttgcagtataattcagctcaatggcatttaacttaatggtaatcccacgttctcgctctagatccatgctgtccaaaagttgagcttgcatttcacggcttgaaaccgtctctgttttttccaaaatgcggtctgctagagtcgactttccgtggtcaatatgggcgataatagagaagttacggatcttctcctgtcgttttttcaattcttctaagttcatgattctcttcctttcagggtatctatttattataaattgtttttgacattttgacaagaccataccctgctaggagtactaatcttcagcaacaaagccctcattttcgataaagtggtgttctgtcattccttggtctgtaaagacaatcccatgaaggacaccaccatagacagctcctccgtccattccaatcttgccatcttctgtagtccaaagctcagcagtaccacgctcttgctttaacaaaccatagactggtgtgtgaccaaagacaatgcttttcccagtatgattttctgcttcgtggaatggttttctgagccagacttttttataatctgtggtttcatgccagtcgtctaaggtcaaatcaatacctgcgtgcacaaaaatatacttgtctgtctctaccacaaaaggcatttgacgaatgaattcgaccaagtctgctgcttcggtagcaactcgcttggcatcctcaactccatcaactggtgcatccaagggacgacctaggatagagttaatggttgtatctccaccattacggcgatagtgatcatagctttcttctggatcatcgagccatgtcaaaaacatatactcgtggtttcctgataaacagatagccccttgattgtccactaagtccttaaccatcactagaacacggcgactatcttcaccacggtcaatcaaatcccctagaaagagcaactgggtctgaccatcccatgttttgagaaggtcttccagcatcccagcttttccgtgaacatctccaattacataatagtctgtcatcttatttctccctgtttctcaacaattctctggcttgcgtcagggctgcttccgtcacatcatcacctgccaacatcttggcaacttcctccactcgctcttcaaccgtcaaaagacgaacagtcgaaaccgttgaatgctcattactaatcttctcaataaagaattgataatctgcaatcgcaatcacttgtggcaagtgggagatagctagaacctgaccatgttggccaatcttgtgaatcttctgtgcgatggcttgagctacacgacctgaaactcctgtatccacctcatcaaagacaatgctggtcttgccttctttacgagaaaaggcagacttaatagctagcatgagacgagataattccccaccagatgcaaccttaaccaagggtttaaagtcttcgccagggttggttgaaatgtaaaactcgaccatttcattgccctcacgactgaatttgcccttgctaaaacgaacctgaaactgggctttttccatataaagatcttgaagctcttgtttaatctctgcttctagctgctgagctaagtcatgacgagcagatgcaagctggcctgccaagtcgacaagattaacttccaatttcttgagttcggtttccatatcctcagatgaaaggttatttcctgtcaagagattgtattcttccgtaatcttggcgaaataaagcaagacatcgtctacagtcccaccatatttacgcgtaatggtatgaaggaggtccaaacgattctcaacctgcataagacgattgccgtcaaaatcaaggtcctcaatgatagcttccagacgtttgctaatatcttctaagacatagtaggtctcagacaaagagcttgaaatttcacggtattcagggtcatactcttcgacactttccatgtcattcatggctgaacgaacattggccagacttgaaaaatcttcattgtccaacatactgtaggcattggtcagcgtatccgcaatatttttatgattgagaagtttatcacgctcctgattgagagccagatcttctccggcttgcaagtttgctgcctcaatctctgccatttgaaattccaacatttcaatacgagccttgtgttcctgttggtttttcttgacttccaaaacctgcttacgcatttttcgataggcatcaaaactcgtttgataggtttcttttaggtcccaaaaagctacgtcaccgaattcatccaacatctggatatgcagttgagggcgcattaactcttcttggtcatgctgaccatgaatatctaccagatgttgcccaatagcacgcaaaacagacagattaaccatctggccattgacacgactaatactacgaccattttgcaagatttctcgacggatgataatttcatcacccatttccaaaccttgctcatcaaaaatttcctgtaaaaggcgactattctcaactgagaaaagcccctcaatctctgcctttggcgcaccatgacgaataacatctgtcgtcgcacgagcccccaacatcatattcatagcatcaatgataatcgacttccctgcacccgtttcaccagtcaggacagtcatccccttttcaaaattgagggaaatagcctcaataatggcaaagttttttatcgaaatttcaagtaacatatagacctaccaattttttacttgttcaaagatttcccctgctagactttcacttctggcaatgactaaaatcgagctatcatcagctaaacagctaaaaattttgtccgcaaaagtctcgattaactgagctttcacaaaggctgtatttcctgggatgacttggagattgatcatcttgtccatcaattctgccgattcgatattgtcttcagccagttgcaaactttttacgattgattttggcaattcatagacataagtgttgtctctcaaaggaattttgacaatacctagttctttgatatctcgtgataccgtcgcttgagtggcagtgatgcctgcttctttcaaatgttctacgatttcttcttgtgtaccgatttgataatctgtcacaaatcgtctaattttttcaagtctctcttttttattcatttttaaattgactatgcgccctctctactatttcttcaatttcagcaagaacctgattacttgctgactcttcttttttcaaatacgctaaaaattcaatatttccatgcccaccttggatgggagaaaagtccaaaccaaggactgaaaaaccttcctctactgccatagctgttacagattcaaggactttctgatggaccttggcatcgcgaataattccatttttcccaatctgctcacgtcctgcttcaaactgaggcttaactagagccacaacctgaccttgagctgccaagactcgatgcaaggccggaaggatcagactgagagaaatgaaactcacatcaatactggcaaagctcggttccttttcgaaatcagtcttttcagcatagcggaaattaaactgctccatgctgacaacccgcgggtcttggcgtaatttccaagccaactgattggtgccgacatcgactgcaaagactaactcagcaccattctgtaacatgacgtcggtaaaacctccagtagaggccccgatatcaatcgttgttgccccttccactgacaattcaaagacctgcaatgccttttccagtttcaagccaccacgactgacatacttgagtttctcgcccttgagttttagctcggtgtcatctggaattttctctcctggcttgtcaaaccgttctccattaaggactgctacgactagaccagccattactccacgcttggcctgttctcgcgtttcaaacaagccctgtttataagctagtacatccactctttccttagccattgattctcaaactttctactacttttacaatcgattctgtttcaaagggaacctgctgagcaatttcttctaatttggcattagcttgatccagagtttggttacaaaaggcaatagcctctttcaagcccaacaaggctggataggttgacttttctgcctgcagatccttttgaggtgtcttgccgatttcctcaaaactagctgtcacatccagtacatcgtctcgaacttgaaaagcaagcccaatcaattcaccaacagttttcagctttgcctgcatttcaggtgacaattcggctataatagcagctgcttggaagggataggctagtaacttcccagtcttattagcatgaatggtctgaagttcttccaaagacaagtgctggtgttcaccctccatgtccaaaacttgccctgccaccattcccagactacctgaagcaagcgataagttggcaatcaagtccaccttgatctgacttggcaaatctgcctgcgctatcaaagcatacggatctaggaacaaggcatcaccagccaaaatcgccatagcttcaccgaatttcttgtgattggtcaatcgtccccgacggtaatcatcatcatccatagcaggaagatcatcatgaatcaagctccctgtatggatcatttccaaagcagcagccacctgcgcgtgagcaggtttgatagcaacctgcaaggcttccagaacttctaacaagagaaaaggccgaatacgcttgccaccagcatgaatggaatagagaacagactctcgcaaactagaggcaaactgctggtctccataaaagtcttccaaggccgactcgacaagagctaatttttcttgctttttcattcaaaatcactttctgttccatcttcttgcatgaccttaactaaggtcttttcagccttgtccagcgtcgcttggagttcttttgacaagaccatacccttttgaaaggcagcaatcgcatcttccagagcaatttcaccattttccaaactttgaacaatggtctccagttctgctagattttcctcaaatttcttttgttttgacatctttaacctctaattctactcgaccatctcgcatcaaaagcgtcacttggtcttttttcttcaaactctcaaccgaatctacaacggactcttcttttttgacaatagcataaccacgcgccacaattcgactggtatccaacatcaacaaggcttctgaaagtcgcttcacttcagcaaccttggcatcataaaccagagccatttggctacggaggagcttatccaactggcctaaacggtcttgatagcgttggattttggtaacaggtgataattgtaccagtcgatgtatccttgcttggacgacttgtttgttatcagaaatccgtgttcgcaaactttgtttcaaacgcaattgcagttgatccaagcgttgcaaatagccatcatacaagcgctctggctgtctaaagataacagaatgactgcattttttcaaagcttcttgtttcttcgataggacatttcggactgctgttgccattcgtttttcctgattttgcaaatgagctaatagatccaacttggtcacaggtgttgctagttcagctgcagctgttggcgtcgcagctcgtctatctgccacaaaatccgccaaggtcacatctgtctcatgtcccacactagagataactggcaaacgagactcaaaaatagctcgtaccacaatttcttcgttaaaggcccagagatcctcgatggaaccaccaccacgaccaataatgagcaaatccaaattgtcccgttgattagcacgcgcaatatttctagcaatttcctccgcagaaccctcaccttgaaccttagtcggatagaggaggatatcgacacctggaaatcgcctgctaacggtcgtgataatatctcgaataacggctccactgcgactggttactacaccaattctcttagaaaattggggcagaggttgcttgaacctctcttgaaacaggccttcttctgccaattttttcttgagttgttcaaacttaatcgcaagcgccccaaccccatcaggctctgccttttcaatgataatggagtagcttccacttggctcatagacctgcacacgcccaatcacattgatcttcatcccttcttccaggtcgaaacctaatttctgataaattccagaccagatggtcgcttgaataactgcatggtcatcttttagggagaaatattggtgagtaggtcgtttacgaaaattggaaacttgaccagttaaatagacccgttccaagtaagggtctttatcgaatttcattttcagatacttggtcaaagttgttaccgataaatacttttccatctccacctactattcattttcttgctctttcatgggtattattataccaaaaatatgcctaaaaatctccatttatgtaccattatgagggaaaaataaaaaaggaggcaaagcctccacatctgattatttgctgtttcgagcttcttccaaaatcttttcaatcttggttgtcaacaggtcaatagccacggtattgctgaccccttcaggaatgacgatatcagcataacgcttggttggttcgataaactgatgatacataggtttaaccacacctaagtactggtcaatgacgctatcaaggctacggccacgctcttccatatcacgcttgatccgacgaataatgcgcacatcatcatctgtatccacaaaaatcttaatatccatcaaatcgcgcaggcgcttatcctccaagaccaaaatcccctcaacgataaagacatcttgaggttcttgacgataggtcttgctacttcgtgtatgctctgtatagtcgtaagtcggaatgtccaccggacgccctgccaacaattccttaatctgctcgatcatcaagtctgtatcaaaggcaaaaggatggtcgtagttggttttgacacgctcttcaaaggtcaaatgagactgatccttgtagtatgaatcatgctcaatcatggaaatcttttcatcaggaaaatgcgataaaatggctcttgaaacactggtcttaccaccaccagaaccacctgtcactccgataatgattggtctattttgcatgctatcctccgtttttttatccgtcgtctattctatcataatttttgcaaaatttatagtctggtttgaatagtctaggggaaacaacactccctacaccccagttagatcagctaaaaaccttccttggcttgtataaattgtctcgcttttctagaatagctagtaatttatcatcttcaaaggcagctaattcttgttctgtttgttcgagttcgataaaacgaccaaagcgcacttctgcagcctcttcttgagttaggaaaactttgacaaggtcgcctgtcccaatctctagaggatgaagaaagtccaattgaccagcctccactttttcagcaatttcttccaaggtaagagcatcttctagttgcaaaccagctgcactagtacgtgttaagtgagacatatgggccgcataacccaatttttctcccaaatcaacagacaaggtacggatgtaagtccccttgctgcatttcacacgaaaagtaaaacgtgctagattcccctcataagaaatcggacttgtccgctcaaattgataaatggtcacctgacgttctggacgctccacttcttggccagcacgcgcatactcataaagcttgcgaccattgacctttacagccgaatacataggtggaatctgggtaataggcccagtcagactggcgattgcttcatcaacaagcttttcatccaagggcgataaaacaggtgtctctgcgaccacttccccactagcatcctctgtcgtcgtggaatagcccagagtgattttcccctcatagaccttgccctcatcctgcataaactcgaccatgcgtgttgccttgccaaccgcaatgggcaaaacacccaccacatccggatccaaggttccaccatgaccaatcttcttggttcccaaaatcttacgcagtttaaaaaccgcatcatgcgaggtcatgcccgcttctttttttaagttgataataccgttcatttttgctttctaattcccttttcactttacatcaacatattctatcttagacagattttaaaactatatcagcttatttttctaaatacttcctagcttcctgaacataaaagagctctggattttcatggacgatactttcaaacaaactacgggcacgagcttcatctccttttaattgggcattgagagcgccgtaataagaaaacatgattcgagctagcttactttctggctcagtaatgttaaagtagtcgttcacttctttattgaacacaatatcttttatggcttgggcttgagcaacaagtgtagctttgcctcctttaaaatctggcgccttggacaattgttcctcaaagaaagcaatatcttgcacatcttggagatgaatggaaactgttaatagttcaaagcttgatattaaaaacgcaggggttctgaatctcttccaaatttttttcaaatcatatttggacatattttccttggcagcttgaaaatctccttttaaataagccactcgaccttggataatttggtaattctcacgatatgttgccctaaagggcttaatagatttttctgattgaactcttaacatgtcttcatatagcttaagatcaatagaatcgtgtaacactagaacaataacttttctagatacaaatcttaaataaaatacaaagacgagaactaaaaagtcaataactaataatatgagtcccaatatttccaaattgctttgaaatattaaaaatactgccatcacataaatatccaagactaaaaataagcaaattagaataaccctatcaagttgtaaaagagtgttttctgtcgccctacttactattttttttactaatttcatatattactctcatttcactgattctaaatattttttcgcttcctgaacataaaagagttctggattttcatgggcaatgctttcaaacaaacttcgggcacgagcctcatctccttttagctgagcattgagagctccgtaataagagaacatgattcgagctaatttattttctggttcggtggtgtcgaagtagcctgtaacttctccattgagtatttttgatactggttcaattaaatccaacattctatttttatcaattcttttaattttttcccaatcataagaaactaaaagtttagaaatttcatccgtctcccttaaatgaaggtatgataatgattctataaatacgatgtttagttcataaatacgtttcaaattcaatttagaacttttaactcttattcgttcagcatattggattgcctcactaaaattcccttgatagaaagcacacctagctaaacccagatttaaggcatttaaattccctgttttattatcaggccgcctttcataagtttcagttaaaagagaaatatattttataaaattcacttgctcgtataaaataacttctgcaacgtgatttactaaaaaatgagttattacaacgataatagtcagtaatgttagaaatatgagcaataatgtagtaacgacggttgattttacgaataataaactaattgctgttgctataattatccaacgtagataaaataaaataaaaacctccagtatgctgcagattcgaactgatgaccaattcgagatattcttagaaatattatctaacataaaaaactcctataaaaaattacaaactaatttatataaacaaactagctaaatgagctagcaaagtagctccagcttttaagaaaaattaattcaattttatcagctgaccatgttctaataatttctatagttcttttcatataacactcctgtttttaagataatctcactcccccttcagtgcttcaaacttcgctttcatggttggatttttacgtgtcaatttcttgacagagacatcttccagcttattattagccagacggagttggttttcagatgttgttaggaactttttaacctcttccatccgttttatggccttgtcgatttcatcgattgccttaccaaagttggtagaagctgaattatagttcttagcaaatgcctgtttaaaggcatccaaatcttcctcaaaatgcgtaatgtctatattttgctcgcgaactaaggccaactcctgcttgtattttaaggaattaagagcagcattacgcaagagtccaatcaactggataaagaattgaggacgaaccacatacatcttttcatactcgtggctgacgtcaacaatccccgtgttaaagtagtcattatcggcctcaagcatagtcaccaaaaccgcatattcacagttcttctcccgacggtccttgtccaattccttgtaaaaatctgcattcttgtgcttcttctctgttccgtcagcttcatttttcatctcaaacatgatggaaatgatttcaacaccattttcatcactctcgcggaagataaagtcgcctttggaaccacgcgcagagaccttattatccttctcaaagtaagcatttggaaaggcaaaactgcggaccttgttaaactcactctccgcatagtgttccaaactttccccgatagcttttgtagattgttgagctttgaaattcttataaaattcgacttgttcactggctgccttgagctgggcttcgtagttttgcttaacagaagccaaagataactcattttccttttcttgcaaaagtagctgatttttaacctgatctcgttctttttctaggtcagaaagggtcttttgcagttgattttcatgttccaaacgcaaggtggccaattggttttccaaggcctgtacttccttatccttagccaataaggcctgattgcttgtctgttcaacctctttcttggccaattctttttctgtatcaaagttttggatttgactctgtaattgcgcaatttcttggtctttttgagctagtttagactgttgctcattcatggccttttgctcagccaaggccagttcctgcttcatgcgatcgtgtagttccttatcaaactctgctgttctcacttgggacaaaagttcaacatactgactttcatttactgtaaagacttccccacagttggggcatttgatttcgttcatatcgttcctctttctagacttctgtaaccattatatcatgcctgaaggaaaatcaaaaacagtgagtcgaaacccactgtttatctttttttactttaaattttttccaaggccaagcgcaaatcttcgatcaaatcatctacattttcaagtccaacagacaagcggatttggtttggtgtgacacctgctgcttctaggtctttttctgacaattgaccgtgagtggttgttgctggatggacaacaagagatttagcatctgctacgtttgcaaggtcagagaagatttccaaactatcaattaccttgcgagcttctgcctccccacctttgacatggaaggtaaagattgagcccacacctttaggcaagtatttctcagccaaggcatggtaaggactatctgcaagttttggataattgactttttctaccttaggatggttgacaaggaaatcaacaattttctctgcattttgcacatgacgttcgacacgaagagaaagtgtttccagtccttgaagcaagaggaaggcattaaatggtgacaaggctgcacctgtatcacgaagcaattggacacggacagcgataataaaggctgctgcacccacatcacgagtatagctcaagttgtgatagcttggatcctcgtcaacaaattgagggaatttccctgaagccgcccagtcaaaacgaccactatcaacgatcactccaccaatagtcgtaccatggccaccgataaacttagtcgcagagtgaatggcaatatctacaccgtgagaaaagacattaatcaagtaaggtgtggcaaaggtattatccgaaacaagtggaatttggtacttatgagcaatctcagccaatttttccaagtcaggaatgtttatcaagggattccccaaggtttcaatcaaaactagcttggtattgtctttgatcgctgcttctacttcctccaaattatcaacatcgacaaaggttgttgtgatcccataacgaggaagggtttctttcaagagattgaaagttccaccgtaaatagttgaggctgctactacatggtcaccagcgtgggcaagtgccaaaatcgtataagtcactgcggccatacctgatgctgttgcaagagctccaacaccaccttcaagagcagcaattctttcttcaaaagcagctgttgtagggttggtgatacgagtataaatgttccctggttttctcaaggcaaaaagatctgcaccttcctgcgtgtcatcaaaaacaaaagatgttgtttgataaatcggcactgcacgagacttggtagctggatccacaacttgaccagcatgcagttgcaaagtttcaaatttaaaatcacgagtcataaggcgacctccaaatagtttgattaaagatattgtagcaccttaaggtatagtttacaaatattagttttctatattttgatatagtaaataactattaccttattttaaaaatgaaaaaagcacgactcaatcgtgctcattttcttaatctacataagtatcttcatttttattgaggaaggcatatggaagacccatcaagaggcctcctccgataaagtttccgatgaaggttacaccccagtggcgaagcatatttccaataccgaagttggcaattgagtcagcagcaacactgaattttacaatcgcgaaagaagcaaagttcgcagcaatgtgctcgtttgttaagaatacaaacatgtaaatcgctgataaaacgagccatagtttagcaccaccatctttgaccaaaacaaatgaaagaatcgcaatatttacgaaaatatttgccaaaatcgcctcaagcaagattaattcatttgaacggcctaacttcatctcaacaacccctgagatgaaactatcgtgagtcagatttgcataggctgccgaatgagcaaagccccaacctgctattaaagctccgataaggttgaataaggtacagtaaagtaaaatctcagccgtttttctccaagaaatttttttcaagaaactaccagcagtcaagaacatcatgtttgatgttaccaactcagcattcaagaaaacaatgtaggccaagccccaagcaaagacaaatgggaagaggaagcgtccactacctggtgcaattttattaatcaagtcagccccaactgcaccagcagcagtactgaaggttaaaaatgcacctgcgaacatagaacgaatcgcatacttaaatttgctttgactataaagactttccttcttcttgcaagcaaattcaatctttgagataaattctgaagaaaccataataaactcctaaaatttttttacctgataattatatcacaaactttagaattaaggaaacgttttctgtatttcataagagtttattttgaaattcaatctataaaaaatcagtaaaacctaagattttactgatttatctttaataacgttgtttatatggttgattgaaagctgttagaatttcttcaggtgtttgtgaataatcttttgtatctttcaagtcaccttttacgataatacgttctgtcgcatcatagtcaacacaagttacaagtgtgatttcatcaactccagtacggtcatcaatctcatcaacgcgatctggagtcacatgcttcacttcacggatttcataggtataaactttatccttatcagtaagataaattttcatcccatttttagcgcgtgataatggagaaaagagcatttggctggcgttttccgccgtgaagatgtgaaggctcgcaagggtatagtttcctttccccatcacttgatcacgcttcattgtaccagctccatagaagagattgacattatcaagccccttaaaaataggcaagttaatttctacctcagggacagcaattccaccgataactggcaatttttgcgaatcccattgtgaggataagacagcttctgacgagatggcttttacggaatcaaagtcaaaattcccttctgtatcttgattttcttccaatttttcttttgatacctggctgacttggtatttattggtattccaaaccatgaacatatcacgaatttttgaattgaaaatcaaagctattgacaagatgattaagaatcctgccaagatattgattagtaaatttttacgatttgttttctttttattctttttatgagacattatgcttcaccttctgtttcgttttctgtcccaacttcttctttttctgcagctgcaaccgtagtaaaggttacaattttagcatcttggtccaggcgcatcactttaactcccatagttgagcgacctgtttgtgaaatattggcaacgttggttcgaatcatgacacctgtatcagtgataatcatcaaatcttcatcgcctttaacggtcataagaccagcaagagaaccgttcttttctgtaatcttagcggtttgcatccctttaccaccacgacctttagttggatattcggtcgcaactgtgcgcttaccataccccttttctgtgatgataagaacctcgtcctggtctgtaatcacactagcaccaacaactgtgtctccgtcacgaaggttaacacctttcacaccagtggcgatacgactcataccacgaacggctgattgattaaagcgaattgaataaccaaacttggtaccaatgataatatccgtgtcctcttctgtcagtaagacattaatcaactcatcttcatccttgaggttcaaagccttgagtccattctgacgaatattagcaaattccttaacgctggttctcttcacaataccatgacgggttgtgaagaagaggtaagcatcatcactacgttcagactcaacattgatgatggtctgaatactttcaccttcatccaatttcaaaagattgacaattggcaatcccttggcaatacggccatactcaggaatttcatagcctttcaggcgatagacacgtcctttatttgtgaagaagagcagatgatcatgggtgctagttgacactaattcacgaacaaaatcgtcatccttaacaccagttccttgaacaccacgacccccacgtttttgagcagtaaactcagcttggtccagacgtttgatgtatcctttattagaaagagtgatcaagacatcagcttcttcaattagatcctcatcttcaagactcaagacttcaccgaccatcaattccgtacgacgttgatcaccaaacttacgcttgacttcatctaattcatccttgatgatttgagaaacacgttcgggcttagcaagaatatctgctaaatctgcaatcagagccaagaggtcatcatactcagactgaatcttatcgcgttccaaacctgtcaaacgacgaagacgcatatcaagaatggcttgactttgacgttcagaaagcttaaacttactcatcaactcagcttgtgcttcagcatccgtttcactagcgcggatgatacgaatcacttcatcaatatggtctagcgaaatcaagagaccttctaagatatgagcacgcgcttctgctttttccttatcaaaacgagtacgacgaacaaccacttctttttggtgctcgatataagcatccaaaatctgacgaagggacaaaatctttggtaccccattttggattgcaagcatattaaaaccaaagttggtttgcatctgggtcatcttgaagaggttgttgaggataacattggctgaggcatcacgcttgacttcaataacaaatcgaacaccttcacggtttgactcatcacggactgctgtaatcccctcaatacgtttttcctgamccaaacgaacaatatgctcatgcacctttgttttattgaccatataaggaaattctgttacaacaatacgctcacgtccagtcttagtttcttcaatttcagtacgtgaacggaggacaatcgatcctttacctgtttcataagccttatgaataccggatttccccataacaagagcaccagttggaaaatctggcccaggcaagacttccatcaagtccttagtggtcacttcaggattgtccatgaccaacttcactgcatcaatggtttcaccaaggttatgaggtggaatattggttgccatcccaaccgcaataccagttgctccattaaccaaaagattaggaaaacgcgctggcaagaccaagggttcacgttcattggcatcatagttatcaacgaagtcaactgtatttttgttaatatcacgaagcatctccagagcaatcttgctcatacgtgcctcagtgtaacgctgggcggcagcaccatcaccatccatggaaccaaagttcccatgaccatctacaagcatgtaacggtaactccaccattgagccatacggaccatggcttcatagatagaggaatccccgtgtgggtgatatttacccatgacatcccctgtaatacgagcagattttttatgaggtttgtctggagtaactcccaattcattcattccgtagagaatccgacggtgaacaggtttcaagccatctcgaacatcaggaagggcccgcgctacgataacactcatggcgtagtcgataaagctcgtcttcatctcctttgtcagattgacattcactaaatttctatcctgcattaataaatgcctcatttcactattagtaattaactatattataccataatgtccgctatatttcagacatctaaaaccactaaaacgtttacatcaagaactgaaatgtatatccgtgacaaagcttttcaaaagtgataaaattgaaataactggggaaatccctgaataaaattaaggagatgtttagaataatgacttcaactaaacaacacaaaaaagttatccttgtcggtgatggtgctgtaggttcttcttacgcttttgcacttgttaaccaaggaattgcacaagagcttggaattatcgaaattccacaattgcatgaaaaagctgttggtgacgctcttgaccttagtcacgcccttgccttcacttcacctaaaaaaatctatgcagctcaatactctgactgtgcagacgctgaccttgttgtaatcactgcaggtgcgcctcaaaaaccaggtgaaactcgtcttgaccttgtaggtaaaaaccttgctatcaacaaatcaatcgtaactcaagttgttgaatcaggtttcaaaggtatcttccttgttgctgctaacccagttgacgtcttgacttactcaacttggaaattctctggattccctaaagaacgcgttatcggttcaggtacttcacttgactcagctcgtttccgtcaagcacttgctgaaaaattggatgttgatgctcgttcagtgcacgcctacattatgggtgaacacggtgactctgagttcgctgtttggtcacacgctaacatcgctggtgtaaaccttgaagaattccttaaagacactcaaaatgttcaagaagctgaattgattgaattgttcgaaggtgttcgtgatgcagcctacacaatcatcaacaaaaaaggtgcaacatactacggtatcgcagtagcccttgctcgtatcactaaagcaatccttgacgacgaaaacgcagtacttccactttcagtattccaagaaggtcaatacggagttaagaatgtctttatcggtcaaccagctgttgttggtgcacatggtatcgttcgtccagtaaacattccattgaacgacgcagaaactcaaaaaatgcaagcatctgctaaagaattgcaagctatcattgacgaagcatggaaaaatccagaattccaagcagcttctaaaaactaatttagatagaaataactccttgagtcatcagggagttattttttatctctatcttaactaaacattttatgaagtttacgtaaaaaacaacataactttaaaagctatcatatcacagtttgagcataaatccgaaaactaccaattagatctatcctcacgttacaaaaagtctgtagcaagcagtatttgacgaacttgataccgtcgcattaaatcgaaagtaaaaaagttttgccccctttttgccacctagacaaaaaaagagcccatcatacaggctagaaagcttgatatgataggctttttttaattttgattaacgtactgtacggatacgcattgtgtttgtacgaacagcttctccaactggtacaccagctacgataacgatatcgtcaccagattgtacaagtcctgcttcaactgctttacgttcagcgatttcgaacatatcgtcagttgaagatggagcgtctgtcaacattgggataacaccccagttcaacatcaacccacgttctgtcaattcgtcgaatgtcaatgccaagatatcagcatttggacggtatttagagatcaaacgtgcagtgtgacctgtcttagtaagagttacaaccaatttaatgtccattgagttagtagcatcttaaccagctgaagccattacttctgtcttagagttacgttcaaatgaatctgagttcaaacgtccgtattcgttaagaagagtttgagcgttcttgtcgattgtagccattgtagttactgactcaagtgggtatttaccatttgcagactcacctgaaagcattgttgcgtcagttccatcgataacagcgttaaatacgtctgatacttctgaacgagttgcacgtggtttttcagtcattgtttcaagcatgtttgttgcagtgataacaactttacctgcagcattgactttagtgataatcattttttggtaaactggaaccatttcgaatggtacttcgatacccatgtcaccacgagcgatcatgataccatcagcagcttcgatgatttcatccaagttatcgataccttgttggttttcgattttagcgaacaattgaacatgtccatttccagtttcttcacagattgcacgaacttcgttaacgtctttagcagtacgtacgaatgaaatcgcgatgaagttgataccttgttcaagaccgaagcggatatcatcgttatcacgatcagcaagagctgggaaaggaattttagtgttagggatgttaacacctttttgtttagcaattacgccatcgttttcaacttcaacttcaaattcacgagttgcatcatctttagcaaccacacgaagaccaagtttaccatcgtcaaccaaaacttgacgaccaacttcaacatcatcatagatatcaagagcaccagcaacgttcaatgcaatcacatcacgagttgatttgattccttgtttagtcgcaacacggattttctcaccagttttgtatgaatactctttagcttcaccttcgaacaattctgtacggatttctggtccttttgtgtcaagaaggaaaccaacttttttacctgcaagtttttctg

SEQ ID NO: 63 - DNA, 112014 bp, Streptococcus mitis NCTC 12261 contig9
gagtctaggacttcgcgagcgtaaacatcagtaataattgacattttttactctccttatgagttaaattttttacacctctataataccttaaaacccctcctttttcaagaaaaaacgttatctttgtgcaaattttccttaactttataaagtaatcgctttcttttgtctgttttattctaacttttatgatatactgttttcatgacagatttatcaaaacaattacttgaaaaagctcatggtggaccaaaattaaatccagatgagcaaagacgctatcttggcacttttgaggaaagagttcttggatatgcagatattgacacagcaaatagccctcagttagaaaaaggctttttatctattttagaaaatcttcaggaaaaagcagaaccactatttgtgaagatttcaccaaatatcgaatttgacaaacaagttttctacttaaaagaagcaaaagaaactgatagtcaagctaccattgtatctgaagagcatacttcttctccttttggccttattatccacaccaatgcaccagttcaagtagaagaaaagaaccttcgacttgcttttgcaaaactttggaaagttaaaaaggaagaaccagccaaaacatccttctggaagaaatggtttggctaaatattgcgcatatttaataaatgcccaatattgttagccgtgcgctccagatagagactggcatttttcaaactatcttctaaaggttcgcttttctctaaaatagaaaaggtagcttggatattttcaaatggtagtgaaggtaaatcttcagcgagactaccgcaaatagcaataacaggaactccgacaggggttctttttgctacccctatcggcgctttccctgctaaactttgacgatctagccttccttctccaacaataaccaagtcagcatctgaaactttcttatcaaagtcaatcaaatctaaacaagtgtcaattccagatacgatacttgcttgagcaaaggcacacaaaccgccagcaatgcctccaccagctcctgctcctttaatttccaatgttacaggtgaggctttttcataaaaatcttggattgcctgatctacgactgcaaacatagtaggatgtaaacctttttgtttgccaaaagtgtaagtcgcaccttgataaccacataagggactcgcgacatctgctaaaatacggatttgaacaccttcaggaatttcatagcgattttctgttgacatagaagctaagtttaataaggactgaccgcaagcgggcaagacatttccatccctatcataaaatcgataacctaaaccagcagtgatcccaattcctccgtcattactggccgtgccaccaacgccgatatagatttctttaatcccttgagcaatgagatgacgaatcaactctccaataccacaagtttggatttgaagtggatttcgtttctctagcggaatttttccaaggccaaccaagtcggcaacttcaaatagtgccagttgacttttttgaaaatagcgcatggcttctttttgtccaaaaggtcctgtaacttggatccatttttcttcaaggtcaagagaatgtcgaatggaatctacagtgccttctcccccatccccaacagggcagaggagacagtctacatctgctatcgattgttggaagcctctttttattgcttcagctacctgttgagcggacaagctttccttaaacgaatctggtgcaattacaatcttcatattttccctcattctaaacagtcaatcaagggaagaacttctaaaaaatccctcttgtcaacatggtttggtatttcttgtttcagtacttctttggcacaaaaagcaattcccagtcctgctgacttcaacattaataagtcattggccccgtcaccgattgcaacagttctttcttgaggaagttttagttcctctctccatttttccagagtctcttttttgacctcaggacttataatttgtccaatcaattttccagttaaaagaccatctttgacttcaagttggttggcagagaaatgggcaattccaagtgattttgctaatctatcaactattggtataaatccaccggacaccagaccaactaggattccattcttttggagaatagagataaatttctgtgcatttggcgatagatgaatagagttgaatactgtatcaaagaccgaatcagggaggccttttaacaaagctactctctctcgtaaactcgtttcaaagtctaactctcctctcattgcccgacttgtaatcagcgaaatttcctcctcacgacctgcctctcttcccaaaagatcaattacttcttctaggagtaaggtgccgtcaacatccataacacacaaaccttttacttgagacatcagttctcctctctaaacagcccaaaaatcgtatgaagtcatcatacgattttatctattaattaactaaactatggtacaactcaaggtatgacctgcaggctgtatcccacgagaaatcacactccatagcttgtttttgtaggtttctccaaacatcaggatggtttctatacaagtccaaagctgtttggaaagtccaatttaaccagtaaggagataaattgtcaaagctaaagccagtaccgcttccttcgattggattgaaggctttaacggtatctcgcaagccaccaacttcatggaccaatggcaaggttccgtaacgcatagccatcatctgagacaaaccacacggttcaaaacgactcggcatgaggaagaggtcgcaagcagcgtagatttcttgagcaagtttgacatcaaaagtgatatttgctgatagcttgtctgggtaaatctgagcaaaccacgagaaagctccttcaaaggctggatctccagttcccaaaagaacaatctgaacatcattttgcaagatatggtgaagactttccaccaccacatcaaaacctttttgacgtgtcaaacgagaaacaattcccaccagaggaacgtcagctctaactggcaagccaactctttcttgcaattttgccttgttttgggctttaccagacaaatcgtcctgattaaaatgataatctaaaagagcatccgtctgaggattataaaggtcagcatcaatcccattcacgataccagacaccttgccagactccattcgaagaatctgatccaagttacatccgaactgactggtcataatttcatgagcataactaggtgaaacggttgaaacacggtccgcatagagaatacctgccttcatccaattcagacagttgttccagcgaagggtgccatcagcgtaacgttcaaagccgactccaaacaaatcccataacattccttctgaaaattgtccctggaattctaaattatgaatggttaaaactgttttaatgccctcataggcttgaatccaacggtatttttccttcaacaagaaaggaatcatagctgtatggtagtcatgaacatggagaagttcaggaataaagtcaatcctttccatagcctcaatggcagccagttggaaaaaggcaaagcgttctccgtcgtcaaaatcaccgtaaacatgaccacggaagaaataatattggttgtcaataaagtagaaggttacaccgtttaaaacggttttcttaattccacaatactgtctgcgccaaccaacactcacctcaaaatgaagaacattttcaatctgatttccaaatttagcctctaccatgtcatagtagggtaaaatcactgcaacttcatgtcccgcttttactagtgatttgggaagagcgccaatgacgtctcccaaaccacctgtttttgaaaagggtgcaccctctgctgctacaaataaaattttcatgaatgaatatcctctgttactttagcacctttcttaacgacgactggatgttctgcagttccacggatcacaactccatccgcaacttcaacacccttgtccaagatagcatattctacctgagctccttctccaataacaacacgagggaataagatgctatctttaaccaagctatccttatggacatgaatattacgtgataaaacagaattagccacttgaccttcaataatactaccagaggcaaactgagaagtgcttaccttggatgtattagcataataagttggctcttcgtttttgacctttgtataaatcttttgatttggtgagaagagagagtagaatttttgtgattcaagcatatctttgttagctttgtaataagactctacagagtgaatgttggctaggtagcctgtgtactcgtaggcaaaagccccttcttttgcagccaaatcccgtaaaacatagcgcaacttctctggatgttcttttttagcttcttcttccaagcgttctatcaaccaaggtgtatcaacgacaaagatatctgtagacatgttatagatttgatctggtaacttgctatcaaagagtttatgagaacgaacatggtctgtttcatccacttccaagattgcgtttacttctgaaatgtctttcttagatagttttttataaactacagtgataggctcttttgttgtactatgtagatggaaaacttggttcaaatcaatattaatcaaaacatcacagttaagtgaaactgtttggtttgagccagaacgtttcaaataagtaagaagctgttggtagtattcttttccaactgtactactttccacacgggtattgtaaatacctagatagtagtggctaagaagagttgacaatccccactcacgaccagaacggatatggtcaaagactgagctaatattatcttgttggaaaataccaaagatactacggacaccagcattagcaagacttgaaagtgggaagtcgatcaagcgatatttaccaccgaaaggcaaactagccactggacgatggtctgtcagtgttgacatatcatgaaaaccaactgtgtttcctaaaatggcagaatatttatcaatcttcatctgttgctacccccactacttcatcatatcctacaacctgtacttcttctgtcccatcaatttcgacaccatcagaaataactgcaccttcaccaataatggcacgtttgattttagctccctgaccgacaattgcaccactcatgataactgaatctactacttctgccccttcgcgaacttgcgcacctgttgagaggatagaatgtttaacagttccatctacgaaacagccatcgacaaccaaggaatcttccacatgagcatttgccccaaggaagtttggtggtgaaattaagtttcttgagtaaatcttccattgacggttacggctatctaaggcattttctggagaaatatactccatgttcgcttcccaaagagactcaattgtaccaacgtctttccagtaaccattaaattcataggcatagacactttcacctgactcaaggtagtttggaataacatttttaccgaagtctgacatatcgactttgctcttttcagcaacaataagcatattgcggagacgttgccaatcaaagatatagattcccatagaagctttggtagatttaggttgagctggtttttcttcaaattcaacaatacgattgtttgcatctgtattcatgataccaaaacggctagcttccttaagaggaacatcaagaactgctactgtcaaactagcattattatccttgtgagactggagcatatcatcataatccattttgtagatatggtccccagatagaatcaaaacatactcagggtttacactgtcgatataatcaatattttggtaaatggcgtggctagtcccctcaaaccaacgatttccttcacttgcagaataaggttgaagaatagagacaccagaattgataccatctagtccccagcttgaaccattaccaatatggttattgagagcaagtggttggtactgtgtaatgactccaacattgttgatgcctgagttggcacagtttgaaagagcaaagtcaatgatacggtagcgcccaccaaattgcacagctggttttgcgatgctttgagtaagtttaccgagacgagttccttgcccaccagcaagaatcaaagctaacatttcattcttcattttctactcctttttggtttttacttgtgacggttttagtaggtttcaagcgacgtttgattttccaaacacttgctcccatagccggtagggtaaaggtcaaggtctgctcataatctttccatagcccttcttgcgtttgcacagtttgattatgttctttccaaacgcctccccactcttctaactcagtattccagacttcttcgtaaatccctgcaacaggaagtccgattgtaaaatcttttcgttcaacaggtgccatattaaagatacagactaacatatcatccttcttacccttacggatgaaggaaagaacactctggtctcgattatccgcatcgatgatttcaataccatcatagctggtatcaatttcccacagacagcggtggtctttgtaaaactggtttagctgagaagtgaaatacttcatcttagcattcattggatcttctaggttagaccattccaactgctcttcagatttccattctaggaattggccgtattcgctacccataaagagcaatttcttaccagggtgacaaatttggtaagtgtagagattacgtaagcctgcaaattgattgtagcgatctccccacatcttgtgcatcatactcttcttgccatgaaccacttcatcgtgcgagaatggtaggagatagttttcattgaaaacatacataaagctgaaagtcaccagattaaagtcatatttacggtaaatcggatcttcttcgtagaatcggaggatatcattcatccagcccatattccacttgtagtcaaatcctagaccatctgaatccttagtgtcagtaatctgagtagctgatgaactttcttctgcaatcatcatcacatctggatgagctagtttaatcacattatttaagcgttgaaggaaataatagccttcatagttgagattgccaccatctttattaggtgtccatggagcatcatcgtagtcaagatagagcatattgctaacggcatctacgcgaataccatctagatggtaaaagtcaatccaaaacttgatactagaaatcaaaaaggactggacttcattctttccaaggtcaaaattgagagctccccaaccgtagttatgagccttattatggtcttggtattcaaaagtcggtgttccatcataataggccaaggcatcatcattgatagtaaagtgaccaggtacccagtctacaataacgcctatattgtttaagtgacattcctcaacaaaatcttgaaattcttcaggacgaccataggcatgctctagagcaaagtaacccataagctgatagccccaactcaaacctagtgggtgagacatcaggggcataaactcaatgtgagtataattcatctcaaccaagtaaggaataagttcatctttcaattgagcaaaactataggggctgccatccggatttctcttccaagagccagcatgagcctcataaatattgacaggacgctcttcaaagctcaagcgttttctacgggctagccagaggccatccttccatttcttttctggaatatctgttaaaatagccccagtaccaggtcgtgcctcatatcgaacagccaaagggtcaatcttcatcagttgatgaccatttgcacgcgtgatatggtacttataaatttggccttcttgagcaagactggtaaagacttcccagactccaaattcattccgttccatcggaatttgattttcaacccaattggtgaaatcccctaccaagtgaacagcctgagcattaggcgcccacacacgaaaagtatagccatactctccatttttttcttccctatgagctcccagatagtgctggaggtgaaaattttcacctgtcataaaggtttctaaagcattattcttatccatacaccctcctatttctgtaagcgttttctatagatttattatactacctttttagggaagattcaagtaaattacggaatttgcaaaaaaatcttttgaaagtcttcaacaaattcactgatgtgttcacttgtaaatcaagaaattttcagaaacgctttgaaaacgaattgtttttttataatactatcataaagttcgttatttagctaacaaaaatataattttaagtaaaaaaataaatcaggaaacgaatctcctgattttacatttcatttcacatcaaaaacaatggatttgacatttgtcatcgcttcaatactatatttaattccttgcactccagcgccagaacctttgacaccaaggaatgggaaattatctggaccacgctgggttttattatttatatgaactgtacccacttcaagtttttcagcaatttcaaatgcttttttgaaatcatttgtaaagactgaggattgaaggccgaattcagattcgttggcaaaggcaatggcttcctctacactagccacacggataattggtaaaacaggaccaaatggctcttcccatgccactttgatatcttttgtaacttggtcaaaaagcactggccatagaagattgccttcgcgtttgattggtgtaagagcctgagcacctttttcttgtgcatcatcaatcaagccccaaataaagtctgctgaagcattgtcgataactggtgtgatatcagcattgtcgaatggatcgccaactgttaatttagtaacctctgcttgaagcaaagcagctagtgtatctgctacactttcgataacaataacacgtttaatggctgtgcaacgttgacctgaatagctaaaggcacccgcaacaatttgcttggcagcatgttccaaatctgcatcttctagtactaaggctgcatctttcccaccaagctccaacatgattggacgcataccagctaaacgaccaatacgttctccgataggagttgaacctgtaaagttgatgaagttgacttctttgtgttcaatgatataatccccaatttctgaaccacgacccgtaatggtattgaaaacaccagccggaatccctgcttcttcaaacgctttagccaacaagagcccagaaatagaaccttgtgttggtggcttaaacatgactacattccctgcaatcaaggcaggtgcaattttagaagcagataaattaactggataattaaagggagcgatagccagcacgacaccaactggctcgcgacgaacaacggccaatttatttttacttgctgcttcaaaaccgccaccttccattgcttgtccagtgatacggagaccttcctcagcagcatagcgaatcaagtctgcggtacgcaccacttctccaatagctgctttaattccctttgccacttctttggcaagtatagtaccaatttcttccttatcacgttctaaaatagctgctgttttgtgcaaataagccgcacgttcaactgctgataaagctcgccaagctggcagggctgcacgcgcagctttcatagcctcatctacttctgcctgagtcatagctggaacagtccctaattcttcttggtttattggtgaataaatcgtaatttctttttcagctgatttccattttccatttactaaattctgatatcttgtcaaattctcgtcctcctgaaaatgattaagatatattttaccaaattttcagaaaattacaaccctttttgcaatttttttgagattattttcacaagcttggtttttcaaactatttgaaacttgattctaatcttcattgaaaacttataaatgataaaaaggattagacaatctaaccctttttagtttatgcatttaagagagtacttttagcactgcgacactagtatcatcaatgacattttcttgtttcgaacgactattggtcacaagcatttctagatttcctgcattttcaaagtataaggaagttcccttggcattgaatactaccaatagatgttctggccccccgtgaatctcgtaaacaatccatccgctattttctgcagctgtgtgaacaaagacatgacggtaaacttcttcgtatgtaggataagaaaaggcgctagtctgtgttttcagtcgaataatttgacggacaaagtcaatgctttcttgtctttcattgattaaatcccagtttatttggttaacactgtcaggagcgttgtaactattcatagcacgttctcggtctgccgaagtgagttgtccatgttcacccgtcggaattaatttggttcgaccaaattcttggccaatttccataaaggacattccttgcatgagaaggttcattgctgtcgctgtctcaaccttgcgcataatctggtctgaactttgatcaggatgaagagtcgccaacaaatcatgaagattgtaattgtcatgggcttcaacatagttgagaacctggtttggactgagataagaacccaattctcggctaccaagaatggccttggcaatgattggttcagtggctgcaccacttacaaatcctgacttgattgcaccataaacttctcctcctttgaccgcatcacgctgattatcattgaagaatccgatatttggcatttggtaggcattatccttcttggccttatcataagttgcaagacctgttcccatatcccagccttctccataagtgataatacagggatcaacctcatctagcgcccaacgaatcgcttgcatggttttgacatcatgaatacccatcaagtcaaaacggaagccgtcaatattgtattcctgtacccagtatagaagagaatcaatcatgtacttgcggaacatttcgtgttcactggctgtttcatttccaacacctgttccattctggaaggtaccgtctggattcatacgatagtagtaatcagggacagttgtttggaaaggtgcatcaaccgttgaaaaggtgtgattataaaccacgtccataatgacaccaatccccgcatcgtgataggcttgaaccatggtcttcaaatcacgaatgacctgccctggatcatctggattactagaaaaacttggttctggtgcattgtagttttgagggtcataaccccagttataggttacatttccatcctcatcgtattccttatggcgatcaaagataggctggagttgaacatagttgcagccaagttctttgatatagtcaaaggcggttgcttgtccgaattggtttacagttccagtctgggcagcaccaaggaaggttccacggagatgctctgcaactccagaggtcggagatttggttaaatctcggatatgcatttcacagataactgctttacatggattttccaaacgccaaggcgcttctgttccatgtttgaccacaaatccttctacttgtctgtcttgatgagaaagaattacggaacgtttgccgtcaggacttgtggcaatcgtgtaaggatctctcgtcacagtctggtggtgaggaaagtcaatctgatactgataagccttgccagcaagattttcatctaagtctagactccaaacaccaatggtattgtacttatgactgtatgaatagctattaccacgctctagattaaaggttttccaaatcggagcgtcgttgctggtattttcgtagacaaccacctgtacagcagtagccgtaggagcccaaagtttaaagctagtctgataatctgaaagactgtaacctagttctccttggtagccccagtggtgatcaaaactagcgctatgtattgctctatcaaaagcaaatggattttgatctttgtagtaaggactagcaatggctgggttttcagaataataaacagtctcgtcgccctctaaaatccaaacttctgtcagaagcggatagtagttataacgcacggaatattccttaactgtcccatcaatctcgacagaaaacttcaggttttctaacttttcttgacttgtaactgtgaaggagaactttgctccaaaaaagttattttcataatacaatttttcaacattgtccgcctgttttctactaaatgaacaggctgcataatccccgttttttcgatgaaaatggatgactacagggtaattaaacatttcttttcctaatttctaattttaatttaattttttatgtggtgctgatagattcagcgatttaatttcttactcaagatagactcaatccatgtcaaaacactttaggaaagacagtttcagactatctaacacctagccttctactattctttataaactttctagccaagcttcatctcgaacctcaataccaagttcttgtgctttttgaagtttacttccagcatctgctcctgcaacaacgaggtctgtctttttagaaacactgcctgtcactttggcacccagactttcgagtttacttttagcttctgagcgcttgagtcgctccaattttccagtcaatacaacggtcaagcctgacaaggctgcatctgccactacagtctgacctttatagtccagatttaccccagcttctttcaattctcttaggagaatttcagagccttctgtcgcaaaataagtctgaagactcttggcaatcacaccacccaaactctcaatactagccacttcctctggatctgcctgagccagattttcgattgaatgaaaatgttgaagtaacagctgactggccttgcttccgacatgacgaattcccaaaccaaataagagcttctcggcagaattttccttagatgcttgaatagcttgatacagtttagaagcagacttttccttaaccccctctaaaaggaggaaatcttcttcttgtaatcggtaaatatctgccacatccttaaccagattagcagcaaatagcttctcaactactgatggaccgagtcctgtaatattcatggcatctcgagaagcaaagtgaatcaaaccttccataatttgggcagggcaacgcggattgatacaacggagggccacttcatcttcaaagtgcaacaagtcagagttacaacttggacagtttgtagggatatctagtttttcttcagaaatccgtttggactctactacacgtaaaacggcagggataatgtcaccagccttatagacgataaccgtatcatctttgcggatatctttttcagcaatataatccacattatgcagagtcgcacggctaacagttgtaccagctagttgtactggtgttagattggctgttggggttacaacacccgtacggccaactgtccaatcaactgataagagttgagcttctttttcttcagctgggaacttgtaggccactgcccactttggagccttaacggtaaaaccaagttcttcttgacttgctaggtcgtttaccttgattaccactccatcgatatcataaggcaggttttcccgttcctgtcctacttcttggataaaattccagatttcatctatgttttctgccaagattcgcttaggattaaccacaaaacctagttgttcaaggtgcttcaacaccttttcttgactgtcacgagttgaaagactggcttcttgatagaggaaggtagcaagattgcgcttggctactactgccgtatccaactgtcgcagggtgcctgctgccgcattacgaggattggcaaattcaggctctccattttcttgtcgtgcttggttgacctggtcaaaagaagcgcgtggcatataacattccccacgaactgtgatatctagttcttctggcaaagtcaaaggaatgtccttaacacgcttgaggttttccgtgatattctccccaacagaaccatctccacgtgttgcaccaacaactaaaatccccttttcataagtaagcgatatagacaagccatcaattttcagctcacaaatataggtcggatgagccacttccttacgaacacgcgcatcaaaagcttcaagctcctcacgtgaaaaagcatcctgcaaactataaagaggatactgatgactgtatttttcaaaaccatctaaaaccttgccaccaacacgatgggtcggactatctgctaacacttgatctggataggcagtttctaactcaaccaactcacggtaaagacggtcgtactcactgtctgaaaccgagggattatcgctggtatagtactcagtcgcatagcgattgagcaaggcgaccaactcattcattcttttattcataaaactattttaccataaattaagcccttctcacaaacgagaagggcggaaaaaacacttagattggaattatttttgaagtccaagcaaacttatgtctctttttcaaaatgagttcgtacatagcctagagctaagaaggataaggcgacaactccaagtccaataatcaagaaagaataaagatggacacttggaagaaaggtcatcaaacctttcgcaagcggcataaagagaattgccagtgtaaaaatggtactcaataccctacccaaatattctccatcaatcttggtctgtacctgtgtaaagaagtgaatattaaaaatcgtcataaagagttcacaaatcaggtttccagaaaaggttaaaatattgggcagaggcaaacccatcatgaaaactcctactcctgttaaaatcaataagaacaaaagtgtattcatacttgatttaaatttatttgctatcagtgctcctataattgagccaatcgcacccatggttaagatagtcgcataagctccttctactccatatagtttatttgaaaaaggaagcaaaaactcaaaagccgcaaaaaagaaattaacgctggaagccactaacaggagaaagaaaatctctttttgatgccagatatagtgcaagccatctttgatatctgcaaaaatatctttaccagtaaaaagtttcttatcttgaaccattggttcttcttttggaagtaaggccactagaacaaatgctataaaaaaagtcaaagcatctagtaagagcgtcagatggagacttgcaaattgtaagaccagaaaagaaagtacaggagaactcacactgacaacctgcaagaccaactccaaacgagaattgtagaggaccagttcatccttctctaccaattctgtgataatggccttatttgcaggtctagaaaaggcaaaagcaatagcctgcacaatattggcaaaaatcaaagcgccaatcatccagctgtcattccttatgaaagaaatagccagacaaagaatcccacaaacaaggtctgtcaccattaaaatcctacgacgagaaaaacggtctgaaatgactccaccaaaaggatttacgagaatagatgtgaccagttcagaaatctgatacattcctaaaactgtctgtccgatagtccccatggaagccaaccagacactatttccataatcatagagcatattccctatcttgttaacagctccacggctaatcaactgtacggcatagcgattcataaaaactcctctcaaattttgaaactattgtatcaaaacttggaggagtttctcatttttcccatatttgggaaaattaatctttgacaaatttctcgtagtgttcctgatagtaggctacttgctctggaagacctagcacgtcaaaaatatgcatggcctcttgcatctgcttacagcctactttacactgtcccttttgatacaaggcaaaaccttttaaataatggaaaacattacgctcataaagtttaatacctttaccaataatcttctctgtataagtctcaaaatatcttgcattgtcaaaagaaagatgctctaaacaatgctggtaacaattaagggctaaaatcaagaccagttttctatggcgaccaatttcttgataaaatccctccctctccatcacttctctaccaattcgagtgacgtagtccacatcgtagaaactatagaggtttccaaaaagaatcaactcatacatggtccattcttctgttttgaagagataatctgctaccttatccaaatcatcccgctccatatgataactcgaatctctttgacaaatcagaccttgtagcaaaatccagttcagctcaaaataaaggggattcgtcgaactcttagccttttcaagttgttctctttgaagcttttgaaaacctgcaatatcatttgagtagtaaaggggtacaatttgtcccatcatggcaacatgttcatgattatgaaaattccttgccttgtccatgaaattttcgattgtaacatgaatgttatccaaaatctcaaagaaacgagaaactgctaggtcagactccccaagctcaaagcgagataactgggaagttgaacaggactcccctgccgcctcctttaaagaataatttccacttgttcgaaattcacgaaatacctttccaagatgttccattttacacctgctccgataattcttcccattcaagcatcgcttcttcctgacggtggctaattttgtccagttcagcctgtaattccatcagtttgtcggcatcgttggtttccaacatttgttcagaaatggcctggctttgactttctagctcttcaatttcagcttctagactttcgatttgtcgcatgagtttgcgaacttctttttgactttctttctgagcttgatagtcattaactggacttgcttcttttgcttgattagtagttgaaatttcctcagtttgaatcatttctacttctgctttcttctcgacatagtagtcgtaatctccaagatagagagttgatccattctcagacaattccagtacatgagttgccacacgattgataaagtaacggtcgtgactgacgaatagaagagttccatcaaagtcaatcaaggcattttccaacacttccttgctatcaatatccaagtggttggttggctcatccagaatcaagaagttgttgttttccatggaaagtttagccagaagtaaacgggctttctcgccaccagacagcatgccgactgattttttaacatcatctcctgagaaaaggaaggcacctagacggttacgaatttcaacttctggtgtcagtttaaaatcattccagagttcatccagtacagtattacttggtgtcagcttgctttgggtttggtcatagtaaccaacctcaacattggcgccaaagcgcttctcacccttgataaaaggaatctggtccacaatagacttgataaaggttgacttgccaataccatttggtccaacaatagcaacagcattcatcttacgaaggtctaggttgataggatctgacaatatttccccatcatagccaatagctgcattctcaacagtcaaaacaacattgcccgacgttttttcagactggaaggtcatgttggctgatttcttgccagcttcaggtttgtccaaacgctccattttttccagttgtttgcgtcgagattgggctcgtttggtcgtcgaagcacgtactagattgcgattgacaaagtcttccagagcagcgatttccttttgttgcttttcatagttttttgcctcagtagctagcttttgctcctttaactcaacaaaacgagagtagttgcccacatagcgatccaaggaatgcttggtcaaatccagcgtaattgtcgcaaccttgtctaagaagtaacggtcgtggctgacaataataagggcgccgctatagtttaccaagtaattctctagccaggcaatggtttcaatatccaagtggttggttggctcgtccaagaccaagagattgggcttttcaaggagcattttagccagtgccagacgagtattttgaccacccgaaagctcggcaattttcatctgccacatagactcgtcaaacttaaatccatttaaaatcgctcgtatatcagcttcataggtaaagccacctgcttggcgaaaattctcagataagcggtcgtaatctgacatcagtttatccaaatcagcaccagacttttctcccatctctagctccatctgacgaagttgtttctccgtccgacgcaaatcatcaaagacatgaagcatctcatcgtagatggtattttcagactcaaaacggctatcttgggctaggtaagacagagaaatatcttttttcttattgatttctccactagttggctcctcttctccaaccaaaatcttcaaaagagtagacttacctgcaccatttttcccaacaagggctatccgatctcgttcatcaacctgcaggtttatattatcaaaaagaacctctcctgcaaaagaacgttcaattttattagcttgtaaaataatcataagagtagtatagcatgtttccctaaggcattcaagacttgataaacaggcatatgtcactacttttctgaaaattatgctaccgttttactaaaacgctaaaaagtgctataatgtgaacggttaaaacaatttacaaaaaggagaatttcaatgtcttaccaagaaaattaccagaaatgggttgattttgcggagcttcctgattaccttcgtcaagatttggaaaatatggacgaaaaaactaaggaagatgccttctatacaaatcttgaatttggtactgcaggtatgcgtggcttgattggtgctggtacaaaccgcatcaacatctacgttgtgcgtcaagctactgaaggattggctcgtttgattgagtctaaaggtggaaacgaaaaagaacgcggtgtcgcaattgcctacgatagccgtcacttctcacctgagtttgcctttgaatctgcggcagttcttgctaaacacggcatcaaatcttacgtatttgaaagccttcgtccaactccagaactatcatttgcagttcgtcacctcaactgttttgcgggtatcatggtcacagccagtcataaccctgcaccatttaacggatacaaggtttacggtgaagacggtggacaaatgcctccacacgacgcagacgctttgactacatatatccgtgcaatcgaaaatccatttgctgtagaagttgctgatgtggaagctgaaaaagcttctggcttgattgaagttatcggcgaagctgtcgatgttgaatacctcaaagaagttaaggacgtaaacatcaacccagccttgattgaagaatttggtaaagacatgaaaattgtctacacaccacttcatggtactggtgaaatgttggctcgtcgcgctcttgcccaagcaggatttgactctgttcaagtcgttgaagcgcaagcaactgccgatcctgacttctcaactgtaaaatctccaaacccagaaagccaagcagcctttgcccttgctgaagaacttggtcgtcaagttggtgcagatgttcttgtggcaactgacccagacgctgaccgtgttggtgttgaagttcttcaaaaagatggtagctacctcaacctttcaggtaaccaaatcggtgctatcatggctaaatacatcttggaagcccacaaaaacgctggaactcttccagaaaacgcagccctctgcaaatctatcgtatcaactgacttggtaacgaagattgctgaaagctacggcgcaaccatgttcaacgttttgacaggtttcaaatttatcgctgaaaaaatccaagaattcgaagaaaaacacaatcacacatacatgatgggatttgaagaaagcttcggttacttgattaaacctttcgtacgtgataaagacgctattcaagccgttcttgtcgttgctgaacttgctgcctactaccgttctcgtggtttgacacttgctgacggtatcgaagaaatctacaaagaatacggctactacgcagaaaaaactatctctgttaccctttcaggtgttgatggtgctgaacaaatcaaagcgattatggctaaattccgtaacaacgctccaaaagaatggaatgcaacagctatcactgtagtagaagacttcaaggctcaaactgccactgctgctgacggtactgttacaaatttgacaactcctccaagtgatgttttgaaatacacacttgctgacggttcatggattgctgttcgcccttcaggtacagaaccaaaaatcaagttctacattgcagttgtaggtgaaaccaacgaagaatcacaagctaaaatcgctaacatcgaagcagaaatcaatgcttttgtaaaataaagccctataaaagatgagaccaaccaatctcatctttttttcgtatcaaatctaagcaattttagaaactttatggcatactagacttatcaatgaaagcgaggtaatctcatggaacaatttttagataatatcaaagaccttgaagtcactacagtagcgcgtgcggaagaagctcttgataaaaaagaaactgcaaccttctttatcggtcgcaaaacttgcccttactgccgtaaatttgctggtaccttggcaggtgtcgtagctgacactaaagctcacatctacttcatcaacagtgaagaaccaagccaactcaatgagttgcaagcattccgctcacgctacggaatcccaactgtaccaggatttgttcacattgcggatggacaaatcaatgtccgttgcgactcttcaatgtcagcacaagaaatcaaagatttcgctggattgtaaaaaagccactcatcgagtggtttttaaatggtcaaaattacgttttttcaagcaaatcttgtatcatccgatgcagttcttcgattttctcagattgtttctctattaatattctttggcccgataattcgtcttggagtttatcaagttttatctgttcatctggattatcttttacaaaaaagttcgtcaaggcacttgttaacattcctattgtactaatccctaccaacattaataaaaaagctagccatttcccaaaaagggaaactggaacaatatcaccataaccaacagtggttactgtcacaagagcccaccaaagactatctgagaaagatttttcttcaactacagataaaattgaacttcctactagaacaataaaaatattaacatacaagatataaatcaggccatttgtccgtaagaatctactaatttttctttctaatttacctgtaagtccaattattctaagtaaacgagtcagtttcagtaattttgtcagccttgctaagcggaagatacgccctaatcgcaatactgtaaaaatagcatttaaaggaaggatagctaacaagtcaaagatattttcaagtataaacctccattttgctttacttgaaaagaaccgccaactataatctaccacaaacacaaaccaaagtagcaagtcaataatactgtatggaggactgtctaaatcaatcatctcagcaaatccaagtaataccagaatatactcaactttaattcaataaatatctctccgatgaccaacttctaaagtagcaatgactaattcatcatctacaatttgtacgataactcgataattaccaattctatagcgccattgaccaacgcgattaccaaccaaagcctttccgtgtcgtcttgggtcttccaaaacattggtttgtaaatagtttgtaattatcttctgcgtataacgatccaattttttcaattgcttgatgaaacgtcttgttggaactaatttatacaaattattcatcctccaagcctaaatcatgcatcatttcttcccaagtaatgggttcaactcctttttccaagtcttctaaatactcttgataggctaaatctgccacacgagcatcgtattcatcttctagagcttcaagagttttggtgcggataagttccgacagggaaaccccttcaaacttagccattgctttcataaatgttttatcagcttcagaaacttttaatgtaatagtagtcatcttttgcactcccttttttaatagtaacaccattgtattactttttaggtgttcagtcaatataaaaagaacaccttcttagcgttctttctatatatctgtcaatggtgttgcggtatctggtgaggtatcatataccttaaagtctatcccaactccaagatcagcttgagccaactgatttaccatggtcatatgagccagttccttgatattgttctccttagataaatgaccaaggtagattttcttagtgcggtttcccaaggtacgaatcatagcttcagcaccgtcctcgttagaaaggtgacccagatccgatagtattcgttgtttgagtcgccaagcgtaagaacctgctcgcaaaatctctacatcatggttggactcgataagatagccatctgcattctcgacaattcctgccatacggtcactaacataacctgtatctgtcaaaaggacaaaactcttgtcatccttcataaagcgatagaactgcggtgcgactgcatcatgacttacaccaaaactctcgatgtcgatatctccaaaggtttttgttttgcccatttcaaagatatgcttttgcgaagaatccaccttgccaagatacttgctattttccatagcctgccaggtcttttcattggcgtaaagatccataccatacttgcgagccaacacaccgactccatggatatggtctgaatgctcatgggtaatcaaaatggcatccaagtcttctggcttgcgatttatttcagcaagtaggctggtgattttcttaccagataagcctgcatccactaaaagtttcttttttggcgtttccagataaaaggaatttccactggaacccgacgctaaaatactgtatttaaagcctgtttcactcattctggtcttctatttcgtcctcccatacttcttccttcactgcatccttatcataagggagcacaatggtaaaggttgatcccttaccatatatactcttggcccaaataaaaccattatgttgtttgataatttctttagcgatagacagtcctagccctgttccaccttgagcacggcttctagcacgatccacacggtagaaacggtcaaagatacgtggcaaatcctgcttaggaatacccaatccttggtctgagatggataaaatcatctgatcatcagtcgtcttcatggtcactgtgatttttccaccatctggagaatatttaatggcattgttgagaatattatcaatcacctgcgtcatcttgtctgtatcaatttcaatccagacagacgtaatcggataatctctaaccaattcatatttcttttcttcgtctgatcccctcatcttatcaaagcggttaagaataaaggtaataaaggctgtgaagttaatcagttccacatctaggtgactagttgcattatcaattcgagaaagatggagaaggtctgtcaccatccgcatcatacggttggtttcgtctagagacaccttgataaagtctggtgcaacaggttctgacaaggctccctcatccaaggcttcaagataggattttacactagtcagaggcgtccgtaactcatgactaacgttggaaacaaagagtcttcgttcgcgttcttccttctcctgctccgtcgtatcatgcaaaacagctaccaaacctgagataaatccagactcacgacgcaccaaggcgaagcgtacacgaaggctcagatactcaccattggcatcctgagaatcaatcatgagttcaggaacttgggtaatcaaatcacgaagttcatactcatcttcaatcttaagtaattctagaatacttttattgagaacatcttccttctgaacacctagctgtttcttagccatgtcattaatcatagtaatcttaccacgacgattggtcgcgaggactccatctgtcatgtaagagaggatactgtgcaatcgtttactctcttgttccagattttcttgggtcaaacggattacttctgataaatcattgagattattggtaatattagtgatttcagagcttccctgcatatccaatacctgagaataatctcctgcaatcaagtctttaactttttgattaatttgcttcaaccgaatattatctcgccgattttctagcaaaagcaaggtaacaatcaagataaaacccaataaaattaaaatgaagataaaatcactagtaagaatattttttctaatcaattcaatcattatttctcatataataaccaacaccacgacgtgttaggatatactctggacgactaggtgtatcttcaatcttctcacgcaaacgtctgatagttacgtcaacagtccgaacatctccgaaataatcatacccccagaccgtttcaagcaagtgttcacgggtaatcacttgaccaatatgagaagccaagtggtacaaaagttcaaattcacggtgggtcaagtctagttcttcaccatattttttagccacataggcatctggtacaatctccaagtccccaatttgcaaaggttgggttttcttttcatctgactcttgattatctacagaaaccaagtccgtacgacgaagaagagctttaacacgcgcctgcaactcacgatttgagaagggttttgtcacatagtcatccgctccaagctccaaaccaataaccttatcaaattcgctgtctttagctgacagcatgataataggaacactactcgtcttacgaatagtctttgcaacttctaaaccatcaatttcgggaagcatcaaatccagaataataatatctggttgctctgcttcaaattgttctagtgcttcacgaccattaaaagcagttacaacctcgtaaccttccttggtcatattaaacttgataatatccgagattggtttttcatcatctacaattaatatttttttcatttgttcacctttttctctactattatatcaaaaaaataaaaagaagacacaatagctagtctttactactgtctaagttggcttgtgcataagcctgccagattttttgttggggtttggcaagtgggtaattcttaaactcttctggtgaaagccagcgaacttccctatctggaaagtcattgtagtcactcacctgacctgctacaatttgaacatgccacttacgatgactaaagatatgcttgacagtctcaaaataaatatcaagccaatcaacatctaggtcatagtcctgctggaaactctcttctggactgggaccaaagttcacgctttcttctgcaacctgatgaaagaggtcaaactgctctccttgcgaaaagttatcaacttctatcaaggggaaatgccaaaaacctgccaatagcttttcactttcatttttttcaagtaaaaattgtccctgagtatttttgaccaccaaggctttaagataaattggaacaggctttttcttgggagccttaattggataacggtccattgtgccattctgatatgccgcactaaagtccttaactgggctttcttctggtctgggatttacaggcgcctcaatatcagatcctaagtccatcaaagcttgattaaagtcaccaggcctttctgggtcaatcaagatttccatcattgcctgaaaaattttacgattacttggaatcccaatatcgtgattaacttcaaatagacgtgccaaaacacgcatgacattaccatctacagctggctcaggcaagttaaaagcaatactggaaatggctcctgcagtgtaaggtccaattcctttcaagctggaaattccttcataggtgtttggaaattgaccaccaaaatcagtcataatctgctgggctgcagcctgtaaattacgaactcgagaataataacccaaaccttcccaagccttcaacaaacgctcttcaggcgcattctccaaactttctactgttggaaaccagtccaagaatcgttcgtaataagggataaccgtatccaccctagtttgctggagcataatttcagacacccagatatgataaggatttttacttctacgccacggtaaatctcttttgttttcatcataccaagcgagaagtttctcacggaaagaaatgatcttctcctccggccacatgacgataccgtattctttcaaatctaacatatctctagtataacacagaagattctaactgtccttttcctagtattagtactcttcgaaaatcaaattcaaaccacgtcaacgtcgccttgccgtactcaagtacagcctgcggctagtttcctagtttgctctttgattttcattgagtataaaaagcctcttcccaaaggaaagaggactaaatcttattgatgaacagcttgggctgctgtgataagggtcaacttgtaaacatcatctgcattacatccacgagaaaggtcgttaactggcttgttcaaaccttgcaaaacaggtcctacagccgcaaagccaccaaggcgttctgccatcttgtaaccgatatttcctgcctcgatacctgggaagatgaagacatttgcttgaccagctaccgtacttccaggagctttcagagctgcagtttcaggaacaaaggctgcatcaaattgcaattccccatctatttcaaggtcaggacgcaagtcgtgagcaattttagttgcttctacaaccttatcaacactttcaccaaaacctgaacccttagtagaataacttagcatagcaattttaggttcgatgccaaacatcttagctgtgattgctgagttgattgcaatttcagccaaggcttcagcgtctggattgatattgatggcacagtccccaaagaggtaacgctccgtaccacgaaccatgaggaaggcacctgaagtacgagttacatttggacgagttttgatgatttgaagagctggacgaactgttgaagctgttgagtgaatcgctcctgacaccattccatcaaccaagcccaagtaaaccaacataacaccaaaatagttgacatcttcaaccaaaaccttgcgtgcatcttcttcagacattttgcccttgcgacgctccactaaagcagcaaccatttcttcaaatttatcgtagtgttgagggtcgatgacttcataaccgtcctcaataccttcgatttcaagataaattttaattttttcaggatttccaagcaaaacaggaatcacttctgtttcttttaccaggcgtttagtcgcttgaagaatacgaggttcttccccttcagggagaacgatacgagcatttttaccaaccaagttggctttgagactttcaaaaacttccatgagttttctccttttagataataattatactctgaaactgtttttatagagtattagttgataactgggtaataaggttgctaaaatcattcggcaagggactttctaactgcaagtcttgctctaaaaatggatgataaaaagataggtaatggcaatgcagggcttggcgctgaattccatcgtctagactaccaccgtacaaatcatctcccaacaaaggaaaaccaatatgagaaaaatggactcggatttggtgggttcgcccagtgtgcaggcgaatgtctaccaaatgaatattcccataagatgctacaatcttgtaagaagtatgagcatactttccacctttagccacccgtctagtgataatagagtcttcatcacgcgcaatcggagcaataatttctccctcttgctccaagtgtccatcacctttaaccaaagcaaagtagcgtttttcaatggacttcttctgcaactgcttgtctaatcgtgcgtgggcatagccgtgcttagcaaagagcatcaagccagaagtatctctatcaagcctagtcacaatgtgaacctgctgattttcatagttttgcttgacgtagtaacccttaataaaattggcaatggtattagagtggttgacactaggaatagaagccactccatagggtttattcaagactagaaaatggtcatcctcatagagaatgtctaatggtctctcgatagcttctagagtttcaaaaccttcctcagcgggaatatcaatggcaacgcggtctccaatgtccaatagatacgtcgcattttgtggttgatcattgaccaggatagctccgcctcgaaacttaatcttagccaggagccccttagaaacctcgtgcttttttaagaaggtcttaaccttgacatgctcatctgcgataaattcaaacctcattcgtccacctctccgataaaagcatccttaactcggttccagaaactggtatggctcggtgatgcgacaaagtgaatcttatgatggtcgatttgatactcaattcgttcaatattgcggaaggaataaacgctattgtcaaccgaaatagtatggtaatcgtttctcgtcgggataagttcaatcttatccttctttggaacaataatggacgaacccagcgttcgatagacacgattgttaaggctggcaatttccgttaattgcaaagcttcaatggttgggtgtaaaacagctccaccgagcgacttgttataggctgtactaccagtcggtgtcgaaactgttagcccatctccacgaaaacgttcaaagtggacaccgttaatcacaacatccgccaccatggttcgatcagacctgcggatgctggcttcatttaatgctctgaaaatcttcacttcaccattttcaagaaagaccttcacatttagaacagggtaagagactcttgctccggtatctagctgcaaattagtcactagcttatccaactcaaaatcacggtagtccgtatagaagcccaaatgtccagtgtgaacaccaatgaagcggaccttgtcaagctggttttcgtacttatgaaaggccgacaagagcataccatccccaccgatggaaataacgatatctggattggtatcattgagtataaactgatttctcttcaaacgatctcgcaattcatacaaaaccctttgactctgcggttttctattagctatcaggtcaattcttttacctgtattcttcatctgtatcgtcactgtttcctacaccatcatttaattttctactcaaaggatcaaaaagtgcctgggcttcctggatatcatctcgaattttacccatttcttcatccaactgatgagcaatcttggctgtaatttccagtcgcttctttatctcctctgggaaatccccttggtacttgtagttgagagaatgttctatcgttgcccagaaattcatggccaaggtacgtatttgaatttccgccaaaatggttttagcaccattgatagtgtcaaccgtatattctactaccacatgataggaacgatagcctgatgcttttcgatgagtaatgtaatctcgctcctgtatgatccgcatatcctgacgcttgcgcaaaatctccactacttccttgacgtcatctacaaactgaaccatcacacgcaaaccagcaatatcttgcaaatcgtgctctaaggtcgcataagtaatgccacgccgagccattttttccctgatgctctcaattggcttgactcggccagtcacaaactcaatcggagaatgcctattttgcttacgatattgcttccgaataccacgtagtttaatctttaactcaccaacagcttgaatgtaaggatctagaaattcttcccattctaaggtcatatattctcccttgttctcatattatccttcaaaaatatctttgattttttctccagattcatatacaataaatacaatgcttattataccataaatccgctttcaacgataaagaaaaggtaagaaaaatgaaacatttagaaattgaattgaaaacactcttgaaaaaagatgaatacaatcgtctaaaggaccagttcacagacgtcactcctgttcttcaaaaaaattactacatagacacgcctgattttgaactgagagaaaagaaagttgctatgcgcattcgaacctttgaagactgggcagaattgacactcaaagtcccgcaaagtgttggaaatatggagtacaaccaaaaattgcgactaaaagatgctgaaaactatctgaacaaggaagaacttcctcaagggcttgtgcttgatgaattagcaaaacatggtatccaaagtaaaaaatggcaggtccttggttgtctaacaacgcttcgctatgaaatgcaaacaccaattggcctcatggcactagatgaaagtcagtactttgatattacagattacgaattagagcttgaagtggaaaatcacgagcaagggaaacaagatttccagcaatttttagaggaaaatcagattgcttatcaaaaagctccctcaaaattggtccgatttgtcaaaagcatgaaaaatagctgaaataatctctattttttggtaaaatagaaaaaataaaatacmaaaatcccagttcatataggctaggcagatatggctaggatttaaaaagtttacagaggaaggtctataatgtcagatagaaaaaacatgaaacttttcgcactcaactctaaccaagagattgcacagaaaattgcacaagctgttggtgtaccgcttggaaaactatcatcacgtcaattttcagacggagaaatccaagtaaatatcgaagaaagtgtccgtggttatgatgtgtacatcatccaatcaacaagtttccctgttaacaaccacctaatggaattgctaatcatggtcgacgcttgtgttcgtgcaagtgcccacagtatcaacgttgtccttccatattttggttatgcacgtcaagaccgcatcgcttcacctcgtgagccacttacagcgaaactagttgccaatatgctagttaaggctggtgtagatcgtatccttacgcttgatttgcatgccgttcaggttcaaggattctttgatattcctgttgacaacctcttcacagttcccttatttgcaaaacattattgcgataagggcttacttggctcagatgttgttgttgttagccctaaaaattcaggtgtaaagcgtgcccgtagcttggctgaatatcttgatgctcctatcgccattatcgattacccacaagatgatgcaactcgcaacgaaggctatatcatcggtgatgttgaaggtaagaaagctatcttaattgacgatattctgaatacaggacgtaccttctctgaagctgctaaaatcgttgaacgtgaaggggctacagaaatttatgctgtttctagccacggtctcttcgtcgaaggtgctgctgaacttcttgataatactaatattaaagaaattcttgtgactgattcagtagcaacaaaagaaaaaactcctaaaaacgtatgctacatcactgctagtgagttaattggtgatgctatcgtccgtattcacgaaagaaaaccagtcagcccactctttgcctacaacaaaaagaaataaggtgattctttgatttatttggacaatgctgcaacgactcctatgtcatcagttgctatttcagctatgactaaggttatgcaagaaacccatggcaatccttctagtatccatggtcatggtcgtcaagctggcaaacttttgcgtgaagcccgtcaggaactagctcaattactgggaacaaaacctcaacatatctttttcacttctggtggaaccgaaggcaacaatactgctatcatcggctactgccttcgtcatcaagaaaaaggaaaacatatcatcacaactgccatcgagcaccatgctgtccttgaaacaattgattacttggttcagcacttcggttttgaagtaaccattatccagccaaaaaatcaggaaatcaccgcccagcaaattcaagaggccttacgtgacgatacgattttggtttctaccatgtttgccaataatgagacaggaaacctacttcccattgctgaaattggccaaatactcaagcaacatcctgctgcctaccatgttgatgcagttcaggctatcggtaaaatccctattcacccagaagaattgggcattgattttctcactgcttcagcccataaattccatggtcctaagggaatcggttttctctacgcatcaagcatggactttgattcctatcttcatggcggagatcaagaacagaaaaaacgagcaggaactgaaaatctagcttccatcgttagcatggttgcagccctaaaagaagacctagaaaaacaagaagaacattttcaacatgtacaaaatctagaaactgcctttcttgcggagcttgagggagttcagtattacctgaacagaggagaacaccatctaccttatgtcctcaatattggatttcctgggcagaaaaatgacctcctactccttcgtctagacttagctggaatttcaatctctactggctcggcctgtactgcaggcattgtccaatccagccatgttcttgaagccatgtacggggaaaattcagaacgtttgaaagaatccgttcgcatcagtttgtctccacaaaatactatcgaagacctagaaaccctcgcaaaaaccttaaaagaaattatcggaggttagccatatggcatttgaaaaaaccattcagttaaaaaattgtcgttacgactacactcttagcccttctgttaagaaattcaccctcaaagacaacactttttttgaaacaaaagttggtaactatgaactgactcgcctacttgaaaaggttccaaacagcggtgaaggcttccaactaaaaatcatcattaacaaggaactcacaggggctaaaatcaatatcactgacaagtttggtcttcgtctagttgatattttcaaatcagaagaccaccacattcatcaggaaaaattctatttcctcatggatagcttggtagaacgtggtgtctttacaaaagcggaaagatagagccaaaatgtttgaactgacctataaggacagctatcatgtagagcgcactctcaagtatgaggattacgaggctctcatgctggctctgtcaggatgtgtgactctgccagatacactttatgtaacttctttgacctttaaagggcaggaagtttaccaaggactggtcggagacctctaccgttttctatcacatgcagattttttacatcaaaactaagatttttcttagttttttcttgtttttgttgattttttcacaatgtttctataaaatagaagaatagaaaggttgtgattttgtgaaagataaacagtctgctattccaaaagctacagcgaaaagactctctctctactatcgaatttttaagagatttcatgcagaaaagattgaacgtgccaactctaagcaaattgcagaggctatcggtattgattccgcgaccgtacgtcgtgatttttcctattttggtgaactaggtcgtcgtggttttggctatgatgtcaaaaaactgatgacattttttgccgatttgctcaatgataactccatcaccaatgtcatgctggtaggtattggaaatatgggccatgcccttctccactatcgcttccatgagcgcaacaagatgaagattatcatggcctttgacctagatgaccatcccgaagtcggtacccaaactcctgatggaattcccatttacgggatttctcaaatcaaggataaaatcaaggatgctgatgtcaagactgctatcctgaccgttcccagcgttaagtcacaagaggttgctaatctcttggtggatgctggcgtgaaaggaattctcagtttttcacctgtccatctgcatttaccaaaagacgtggtcgttcagtatgtcgatttgacaagtgaactccaaactctcctctacttcatgcgaaaagaggattagaaagcgaaaatcattttatgaaaaaaccagttattgggattacaggaaacgaaaaaactcatccagatgatgacatcatgatgagctacgcagcaaaaggctttgttgaaggcgttaaagacgctggagggattcccatcatcctaccgattggtgatcaagaaatggcctgccactatatcagtatgattgacaagctcatcttgacaggtgggcaaaatgttgatccaaaattctatggtgaaccaaaaaccattgatagcgatgactaccaccttcaaagggatatctttgaactggccctcatcaaggaagctattaaacagaaaaagccaattttctctgtctgccgtggtacccaactctttaacgttgccatgggtggaactttgtatcaagatatcgaagatcactggcaggattgttccgccgagtacacaacccaacgcttggcgacagaaccagataccgttctccgagaaatctatggagaaatttcccatatcaactccttccaccaccagagcatcaaggatttagcaccaaatttaaagattgcggctcatgatcctaaggatggcattattgaagctgtcatgagtacggatgatgtcgcctttctcggtgtccaatggcatccagaatttctttttgaaaatcgtcccaaagataaaaacctctttgactatatcgttaatgaactttagattaaatctgtcttttctcgataactaaagtaactggagtgagagacaatcaaatggtccaagaggacaattcccatcagatcgcaggcttctttgacaagtttagtgacatgatcatcatttcggctaggggccaccgctcctgaaggatgattatgaaccaagatgagagaagtcgccatatgcttgatagcatagtgaagaatctctcgcggttcagcaatactacgagtggcagaaccgataaaaatggtctgttgatggatgatttgattttgagtattgagatagagcgccaccaggtgctcttgttttttatcccccaattcctgttgcatcttcttggccaacttttgactgctgagaatactttccatctcaagggtttcgtgtttatgaatacgatggcccagttcaatcatggcttgtaactctattgccttaactcgtccgataccagatagactctgcaattcctgcagtgtcatttttttcaaatctgttaggcttgaaagattattcaagactttctgggcaatttcaaaaacactggcctgacgtgttcctgttctgagtaaaatagctagcaactcttggttactgagcgcttccactccttcttgggcaagtctttctcttggcaatagtgaatcttcttggaatgaaatactgtacataaaaatcctcctcactttattattcgtgagaaggatgaaaaattagatttttttctcaattggggccacactggccaaaagttttttcaaaccaacttctgggaaattgatttttaattcctgcgtagcaccgctacctgaaacttccagaacagttccctctccccatttcttgtggagggcaatgtcaccaatggaccaatttgtttcgctagacgctgattttgcaccagctgtaaattgaccaaatgggagaccgcttgactggatagtttttggggccgcactgcgtttacggtcttgaagagcctgggccaaactcataccttgaccgaaggcaaggccaccactactatatgatgctttaaagcttgtatttgctggacgagccagaccttgatactcaagcaagtctgaactgatttcgttaataaatcgagtaggacggttgtagttggtacgaccaaaaagcaggcgtgagttggcatttgtcagatagaggattttctctgcacgcgtaattcctacataggccagacggcgctcttcttctagttcatcttgatcttcagcagcacgactaagtggaaagacattttcttccatcccaatcaaaaagacaactggaaactcgagacctttggcagcatgcagggtcattagagtaacttctgatgtctcctgactacctgaatcggtgtccgcaatcaaggctaaatcatttaagaaacgactcagtttgtccagaccagtttcttcttctggctcatcagaggtgtcatcaaagtttttcgtcacagaaaggaactcttcaatattttcaacccgagccttactttccagagttgcttgggcattaagaatatcaacgtaacctgttttttctagaaccgcctcaaccaactctgtaatatttaattgatctagctgctctcgcaaatccagaaccatattggcaaaatcccagatagactgggctgctttacccttgataccagacaacatgatattggcagaagcatccagcatggacatgttttgcatattcgcaaagtcacgaattttctcaactgtacctgggccaattccacgtttaggctcgttgataatacgctcaaaactgatattgtcactcaaattagcaatgaggttgagataagcgataatatctcggatttccttacggctgtagaacttggttccgccaaccatggtataagggatatttgacttgagcaaggcttcctcaatagtacgggactgggcattagtccgatagagaactgcaaaatccttgtgaaggaagttttgactgcgactaagttcatcgatggttctggctacaaatacagcctcatccagctcatcatcagcacgatagtaaacgatttgctccccatcagcattctgggtccagagattcttaggacggcggtttttattgtttttaatgacctcgttggccgcttggagaatagttttagttgaacggtaattctcctccagcaaaacaaccttggcttggggataatctttctcgaaatccaaaatattctgcatatcagcaccacgccaaccgtagatagactggtccgcatccccaaccacacagatatttttaaaacgggaagccaagagtttgaccaattgatactgagcgtggttggtatcttggtactcatcaacatggatgtactgaaacttctgctggtagtaggtcaaaacatcaggattttgatcaaagagacgcaaggtcagcataatcaaatcatcaaaatcaacggattcagactgacgaagttctttttgataagctgtgtaacactgggctacgatttgcgtgtacatatcgccagcttgggcagcataggcaacatcatcaatcagatcattcttagcattggaaattgttcctaagatgctccgttcattccattttttcggatccaggttcaactgcttaagaatgcgtttcataagagttcgctgttcaccaggatcgacaattgtaaaattacggttgtagccaatatggtccgcatcgcgacgcaagatacgaacacacatggagtgaaaggtcgcaatcaaacagtcctgagtggctggattgaggccataagcacgttccttcatctcacgcgcagccttattagtaaaggtaatggccaagatattccaaggattgaccagcttttcatcaatcagataagcaatgcggtgggtcaaaactcgggtctttccagaaccagcccccgccatgatcaacaagggaccttctgtcgtttgcaccgcctcagcctgacggtcattcattccatttaataatgcgttcatcttctcttccttactcttgaagtcaatatttccattatatcagaattcgaggaaaatatctttaactagaatggttacgtatagtaaacaactctctcatcaactgaagacaactacttctatctagataaaaaatgagcttggattaaaatctccaaactcatttaaagtcaattacaatctactagaacaagcctagaacagttccgtcgctttcaacatccatgttgagagctgctggtcgttttggaaggcctggcatggtcatgacatcaccagttaaagcaacgatgaagcctgcacctaattttggtaccaattcacgaatggtaatttcaaagttttcaggtgctccaagtgcatttggattgtctgagaaactgtattgagttttagccatacagattggcaatttgtcccaaccattctgaacgatttgagcaatttgcgtttgggctttcttctcaaagttgactttgctaccacggtagatttcagtaacaattttttcaatcttttcttgaacagaaaggtcattgtcatataaacgtttgtaattagctggggtttcagcaattgtcttaacaactgtctcagcaagtgctaccccaccttctgcgccatcagcccagacactagccaactcaactggtacgtcgattgaagcacagagttctttcaaggctgcaatttcagcttcagtatcagatacaaattcgttaatagctacgactgcaggtactccaaatttacggatattttcaacgtggcgttgcaagttagcaaaacctgcacgaactgcttctacattttcttcagtaagagcgtctttagccacaccaccattcatcttaagggcacgaagggttgcaacaataactactgcatctggagatgttggcaagtttggtgtcttaatatcaaggaatttctcagcaccaaggtcggcaccaaaaccagcttcagtaaccgtgtaatcagctaagtgaagagctgttgtcgttgccaaaacagagttacatccgtgagcgatattggcaaatggaccaccgtgtacaaaggcaggtgttccgtaaattgtctgaaccagattcggcttaatagcatccttcaaaatcaatgccaaagcaccttcaacctgtaaatcgccaacagaaacaggtgttcggtcatagcgataaccgataacaatattagccaaacggcgtttcaagtcctcgatatccgttgccaaacaaagaattgccatgatctctgaagcaactgtaatgtcaaagccatcctcacgtggaataccatttagaggaccaccaagtccaacggtcacatgacgaagagctcggtcgtttaagtccacaacacgtttccagaggatacgacgttggtcaattccaagctcattcccttggtgcaagtgattgtcaatcaaggcagaaagcgcattgttggcagttgtaatagcatgcatgtccccagtaaagtggaggttgatgtcttccattggcagaacttgagcgtaaccaccgcctgcagcaccacccttaatccccattactggaccaagggatggttcgcggatggcaatcatagttttcttgccaatcttgttcaaagcatcagcaagaccaatggtaatagttgattttccttcacctgctggtgttgggttgatggcagtaaccaagatcaatttcccaactggattgctctcaactgcacggattttatcaaagctgagcttagccttatactttccgtacaactccaaatcgtcgtaagaaataccaagtttctctacaacatcaacgattggcttcaactcaatactttgtgcgatttcaatatctgttttcattcaaaactcctctaacctcttatatgataattcattataacacaaaacaagatttttaacatccttaaactctctaaacgttcgtaaatatctctatttttaagaattttagagccctttcttaaattttatatggctttatagtttgaaactatagtaaatcttcgtttttaccaaaaatttatcacttttattttacttaccgtttatttttgtgtacaatagtgctatgaaaattttagttacatcgggcggtaccagtgaggctatcgatagcgtccgctctatcactaaccattctacaggtcgcttggggaaaatcatcactgaaaccctgcttgctgcaggacatgaagtttgtttgataacgacaaaacgagctgtgaagccagtagcccatcctaatctaagtattcgagaaattaacaataccaaggatcttcttcttgaaatgaaagaacgtattcaggattatcaggtcttgattcactcaatggccgtatctgattacactcctgtttatatggcaggacttgaggaagttcaggctagctccaatctagaagaatttttaagcaggcagaatcatcaagctaagatttcttcaactgatgaggttcaggttttattcctgaaaaaaacacccaaaatcatctctctagtcaagaaatggaatcctgctattcatctgattggtttcaaactgctggttgatgtctctgaggattatctcatcgagattgccagaaaaagtcttatcaagaaccaagctgacttaatcattgcgaatgacctgactcaaatctcaccaaaccagcatcgtgcaatctttgttgaaaaagatcagcttcaaacagtccagactaaagaagaaattgcagaactcctccttgaaaaaattcaagcctatcattcatagaaaggaaagctatggcaaacattctcttggctgtaacgggctcaatcgcctcttacaagtcggcagatttagtcagttctctaaaaaaacaaggtcatcaagtcactgtcttaatgacccaggctgctacagagtttatccaacctttgacactacaggtactctcacggaattccgtccacttggatgccatgaaggaaccctatcctgatcaagtcaatcatatcgaacttggaaaaaaagcagatttattcatcgtagcccctgcaactgctaacactattgcaaaactagcccttggctttgcggacaatatggtgacctgtacagctctagccctgccaagtcatattcccaaactaatagctcctgctatgaatacaaaaatgtatgaccatccagcaactcaggctaatctgaaaacattagaagcctacggctatcagctgattgctcctaaggaatccctactagcttgtggagaccacggacgaggagctttagccgacctcacaattattttagaaagaataaaggaaactctcgatgaaaaaacgctctaatattgcacccattgctatcttttttgcaaccatgctcgtgatacactttctgagctcacttatctttaacctttttccatttccaatcaaaccgactatcgttcatattcctgtcattattgccagcattatctacggtccacgagttggggttacacttggatttttgatggggctgcttagcttaacggttaacacgattacaattctaccgacaagttacctcttctccccatttgtaccaaacggaaacatctactcagctatcattgccatcgtcccacgtattttgattggtttgactccgtatctagtttataaactgatgaaaaataaaactggtctgattctagctggtgccctcggttcacttaccaacactgtctttgtacttggtggaattttctacctttttggaaatgtctttgatggtaatatccaaaaactcctagcaaccgttatctcaacaaactccattgccgaattagttatttccgcggttctgaccctagctattgttccaagactacaaactttgaagaaataaaaacaatctccgctttcatacttgaaggtggagattttgtttgaagtcgtttctttttagtgaaatctttaccaacttttaactaaaaaacgaccaataaacccaagtaaatccttgctttattgtcttgtttgttgtactatactagtgtatatacagttaaaaaggagattcttatgaatacacggaaaaagacacaatttatgacaatgactgccctcttaacggctattgcaattttgattccgattgtgatgcctttcaagattgtcattccacctgcttcttacactttggggagccacatcgctatttttattgccatgttcttgtcgcccttgatggcagtttttgtcatcctagcctctagttttggattcttgatggctggctatcccatggttatcgtttttcgagctttttcccatatcttttttggtactctaggagctctttacttacaaaaattccccgatactcttgataaaccaaaatcttcctggattttcaactttgttttagctatcattcatgcccttgctgaagtattagcctgtgtcgttttttacgccacttccggtaccaatgtagaaaatatgttttatgttctatttgtactagttggatttggcacaattatccatagtatggtagactatacattggcactagctgtctataaagtgcttcgaaaacgccgttaaaaggaagaactatgacaaaagatcgcaaacaagcccttctccaactcttgaaagaagctcctaaagccctcaatggccaaagtttagctgaacattttcatgttacacgccaggtcattgtacaggacattgcaattttaagagccgatggcgctcctatcctatccactaatcgtggctacatctataagcaaattgaaaccaatccttatgttcacaaacttttcaaagtgaaacatgaagttgaagaaatcggtcaagaactccttgctatcgttgataatggtggacgtgttcaaaataccttgattgaccatcccgtttatggagaaatcgaaaccttgctgaaactgtcttgtcgcagagatgtgcaacattttctagaacaagtcgagcattcagattttagacctctgtctgaattgacagatggcatccattaccacctagtcgaagctgaaacacagcaagacctccgctatatcgaggaggccttggatcagctaggttatttagtaaaagactagaagattttcttctcccagccatcttctatacgatgacggtagaaaaattcagatttgtccggagcttccatcatctccatcaaaggtagcatatcataggccagatccaagtttggaatctggtctttttgaatccaatagctcaaatagtaacaatgatatttaaaaaccacattgaatgaaaattaacaactacttgcttactaaaaatatatcaccagttatgttgatcaacattatccttagtcacaagataaattggagaaactgtttctttttccagttttttcccttgataatgatctattgctgattgaatagcaatttcacccatcttagctggttgctgagcaatagtggcagtaatatcaccttttgcaatagcatcatgtgcatctggttgaccatcaataccaacaattaatacattgctaagaccagctgcttttactgcttgtgcagctcctaacgccatctcatcattctgtgcaaagattgcttgcacttctttgtttccttgaatcatattttgcgctgtattcaaagcttttgcgcggtcaaaattagcggattgactagaaagaacatctaaatttgtctttgaaatttgttcaaatcctttacctctatctacagttgcagaagcgccagggactcctgataattcaaaagtttttgctttttctcccaattgcttggtaataaattctgcagccattttacctgcttctacgttatcagaagcaacagttgtcaagacttcacctccattactaccgcggtcaattaagattaccggaatatttgcattattagcagctttaatagatgtaacaattgcatcagaatcaactggattaattagtaaagcatcaacattttgactaataaaattttgaatatcatctgcttgtctagcagcatcatcttgtgcatctgctatcttcaaagttacttctttttctcttgcggctttttcaagaccatctttcatagctacaaaatagggattgttagtagtcgaaatagaaactcctaattttaattcttttgccgacttttgaatcgtagatttattatcatttgatgaatttcctaaaccagtttttccacaagctactaaagcaaaaataaatgttacaaacaaagcaaaaatgctaatttttttaatatttttcatgttattactcctcgtaatatatatctatagggatagtttcaatcccgattattgtacgtcatctaataaattgttactatttccaaaaaaattgaaaattattctactgttttacaactttaaaacgatcaatcagaacagcaattaagattacaactccttttactacttgttgccaaaatgctgaaacaccgataatattaagtccattattcaaaaccccaataattaaagcacctattaaggtccccagtatgcgacctttacctcctgataaagaggttcccccaagaacaacagctgcaatagcatccatttcataactagcacctgctgttggttgagcagaacttaagcgtgatgttataatcaatccagaaattgaagccataatacctgaaattgaataaatgataattttcactttatttagtttcacacctgatatatatgctgctttttcattcccccctatagcatacacagatttaccaaatgctgttttatgaagtaaaacatataaaacaataaatacaataaacataataattacaggaaatggaattccgactatataaccttgccccaaaaattgaaataagaatgtatcacttaatccttttgtgataggattcccatttgtataaacaagtgttgcgcctctaaaaatagtcatagttgctaaagtaacgataaatggagctaatttcccgtaggaaatcaataaaccattcatcatccccagaatgcaacccaaaaattaaagagatgagaattgctaacgtaacaggcattccagatcctaataggccagcggttagcgcactggataaggctaaaattgatccaactgataaatcaattccacctgttagaataacaaaggtcattccaaaagcgatcagtgcatttgatgttacttgcaatagtaaatttaacagattatttgctgttaaaaaatttgaattgataatagtgatgacagccattaaaattatcaatgctattactgttgtcaattctgacatatacttcatagtatttttcacactattgtcctcctgtggctagttgcataactttttcttgtgtagcttcttgacgtgttaattctccactaattcttccttcatgcatgaccataatgcgatcactgactccgatcacttctggtaaatctgaagataccataataatcggcacacctcgttcagccaattcattcattaattggtaaatttcacgcttagcaccaacatctaccccacgagttggctcatctagaatcagtacttttggagcaatacctatccattttgctaaaactactttctgttgattaccaccagaaagtgtcccaacttccttatctggataacctgatttaattcgtagcctatcaattaaacgttgtacaaatatatcacttgttttattatcaaaaatgccatttttaacaaaatcacgagtactaggtaaagtcatattatctttaatagaaaaatctaaaatcaatccctcatctttacgatcttctgttaagaaaccaattccatgcttaattgcttcaaaaggatttttaattatcagttcttcttcatttattataatttgaccagattttaaagaatcaattccaaaaattgctctcattatttcagtacgaccagcacccatcaaaccagaaaaaccaagaatttccccttgacgtacatagaaagaaatatccgtaaaagcatcaccagaaagattcttagcttgaaaaacaatattcccaatctcagcctttttttctggataataatcttctaattcacgccccaccatcttttgaactaattcatccgcattagttaacttcgttctcttggtatcaattacaaacccatccctcataacagttataagatctgtaatcttaaagatttcttccatccgatgtgaaatatacacaatacctacaccatcagattttaatccttctatcactttaaaaagtgtttcagtttcacgatcagttaaagctgctgtgggttcatccataattaacaaggaaacttctgataataaacattttgctatttctatcatttgttgttgtccgactgataattgaccaatgattgcatcgagaggaatagagatattaagacgtttaaatgcttctttagctttcctttccatactagctttatctagaaacccaatcgaatttttaatttctcttcctaaaaaaagattatcaagtacagtcatatctggccaagtattcatttcttgatgaataaaactcagtccaaaccgttctgcctcttgaggattagaaaatgttttttcttttccatcaataaaaatagttcctgaagtagctggaaaaagtccagttaaaatattcattaaggttgatttgcctgcaccattctctcccattaaagcatgaacttctcctgaattaagaaccaaatcaatactttctaaaacacgattattcccaaaagattttgaaatgttcttcatttcaattttcataggcaactcccttctaaataataactcctgattgcaagattatattcgaatatggtgtatcttccccagtgcgaataactgccttaactgtagtattcatagctttcaattcttcatgactaatatattcaataattatattcgatcctaaaagatctagaactgcttgccactgttctttgtttttttccttaatttcttctgctaagaaaattttttcaataagtacatgatctgaatattcttttaaaacttctaaaaaacttggactaccttttcttaatgctaaatcaattttatcaataccttttggaactggcaatcctaaatctccaatacaaaccaaatccatatgacctaaatcatcagctagttttgctatattactatttaaaatcccatatttcttcatatcctggatgctcctttatttctttcaaactcggcatgccaccttgcgctccaaatctttgaacagaaagatgtgaagcaatcgttgcaaaggacaatgcaacattcatctcttttccttttgagacagcataagcaaaagcaccattaaacgtatctcctgctcctgtagtatcaactacttctgcttttatagcaggaatcttctgaactgctgccccatcataataaatagaaccttcaactcctaatgtcacaatcattttattaggataaattttaataatttcttctaatttcttatctggaaaaagctctgaacattcatgctcattaggagtaataaaatcacaaaaaggaatcatctctatatctgtttctctagctggtgcaggattgtaaagtaccttaactttattttcttgacaaaatttagctatagataggttggcttcatgtggtatttcattctgtaatacaacaatacttgcatcactaatcaattcccactcatttttccaatcatttgttttaactaaattattcgctccgggataataaataattctattatcacctccatataaagtaatttgtgcaactcctgtagattgtggtaccgttcccacatgttctgtagaaatattattattttgcagattacttagtaaatctgctgaaaaaatatcttctccgacgtttccaaatatgtaaatattatcttctacactggataatctaccaatagctacagcttgatttgcaccttttccacccggaactatattaaatgaatccccaaaaatcgtttcacctccttctggaatcctttttgttctcataactaagtccattgaaatacttccaacaacaacaattttactcattactttctccttaatgtatttctttctacgtatctaacaggtagtttaattttagcttcatctatagagaacttatttgccatattatagattagctttgcagcctgttctcccattttatatgatgattggtgaatagttgataaagaaggataaataaattgactaagtacaatatcatcataaccaatgatttgaatatcatctgggatttttttaccaattgctaaaatttcatgaatataagctatcgcatgaatatcagaaggcgctataatactatcaatatttggatttctttttagattctctttagcttctgtttgaattttttcaaactcaaatgtttcactttcttcaatacgaatctctaaagatttattcctcaaatagtttaaacttgcttcaaatcgttccgcaatgttctcagctttatcatctaaaactttaataatcataacttgcttagcgccagcattccaaattgctttagcagccaaacgtccacccaactgattatcagaaaagacaccgtaacctgtatctttactaatccggtcaaccacaacgacaggtaacgtcagatttggaaattcctttgtaaagtcaagtgtcgttataataccagctgcatttgtttttaacaaaaggtttatatattcttctaacgaatcatgatctgaaatagtaccaaccataatcctataacctttatctttcaaatatgattcagctcctcgaaccaatcttgggaagaagggattagaaatatctggcaataagagtcctaccatttgattttttttagttttcaaagattgtgctaatacattcggcgtgtaatttaatttcttgatagcattttttatcttttctctagcatcatctccgacatagccttttttcgaaatatatcttgaaactgttgattttgatactccagcttcttcagcaacctgttttattgtagtcatcactcctccttcttacgttgtggaaccgttcccttatttatatagtaagcgttttcttttattttgtcaatacttttttagaaatattttaaatttatttcagagtacacatgtttttactaatatcctattactattagatacgaaacacaacaagacctccactatattgaggaggccttggatcagctaggttatttagtaaaagactagaagattttcttctcccaatcatcttctgtacggcgagggtagaaaaactctgatttgtcaggagcttccatcatctccatcaagggtaacatatcataggccagatccaagtttggaatctggtctttttgcacccaagaaacttctccttcatctgaagagcgaaggctaccagagaactcagtcgccttataacaaatgacaatatagcgcccacctgtatctagtggccaatttttaatgccgacaagttgaggattttggatagtcaatcctgtttcttcgtagatttcacgaatgacagactccgcaaaagcctcaccattttcaacatgacctccaggaaaggcataaccagaccagcgatttgtttcaggagagcgatactgcataaccacgcgctgagtttcggggtcttcaatcagacaaatgtttgttaaaattgttaattgggaacgggacatattttctcctttagatactattctaatccaacgccttgacttccagcatcatatcacgaatctgagctgcgagttcaaagtcaagcacttcgacagcttcttgcatttgtttttctagtttcttgacgaggtctttgcgttcttgtttattaaggctattaatatcgacttccttgtcctcttccttagcaactgccttggtcacggcaataagatcacggatttctttcttgatggtttgaggtacgataccatgctcttcattataagccatctggattttccgacggcgggcagtttcatcaatggcacgttgcatagactgagtcatcgtgtccgcatacatgatgacatgtccttcgctgttacgggcagcacgtccaatagtttggattaagccacgttcgttacggaggaagccttccttgtcagcatctagaatggctacgagactcacttcaggtacgtcaatcccttcacggagcaggttaattccgaccaagacatcaaagacacccaagcgcagatcacggataatctccgtccgttccaaggtcttgatatccgagtgcatgtacttgaccttgatacccatttccttgaagtagtcggtcaagtcctctgccattttcttagtcaaagtggtgataaaggttcgttcattcttttcaacacgggcattgatttcacccaaaaggtcatcaatctgtcccatagtcggacggacttctacctctggatccaagagtcctgttggacgaatgatttgctcaatcactgtctcggtctgttcattttcatagtcaccaggtgtcgctgaaacgtaaacaatctgatgaacgtgactctcaaactcctcccgacggagaggacgattgtccaaagctgatggcaaacggaaaccataattaaccagcatttccttacgcgaacggtcaccattgtacatacctttgatttgtcccatagtcatatgactctcgtcaatcataatcaagaaatcatctggaaagaagtcgagaagcgtataaggtggctcaccttcgctacggccatccatatggcgtgaatagttttcaaccccatttgtatagcccatctcgcgcagcatttcgatatcgtactctgtccgctgcttcaaacgctgagcttcaagtaatttgccttccttctcaaagacagctaactgctcctccaactctgcctgaatcttggcaatagccacttccatatggtcgtcattggtcacaaagtgagtagctgggaaaatcgccaaatgatccacttctcccaatacctggcctgtcagagcctcaacctcacggatacggtcaatctcgtctccgaaaaactccactcgaaaggcatgttcatcacgggaagcagggaaaatctccactacatccccacgcacacgaaatcttccccgttggaaatcaatatcattacgttcaaactggatatcaaccaagtcattcaagagtttatcacgagaaatttcaagacctggacggagactaacgacactatcagcgtattccttgggcgaacccaaaccatagatacaagagacagaagccacaacaatgacatcattacgctccaaaagagccgaagtcgctgagtggcggagtttatcaatctcgtcattgacagagctgtccttctcaatataggtatcactagaaggaacataggcctctggctggtaataatcatagtaagacacaaaatactcaacagcattctcagggaaaaattccttaaactccccatagagctgtcctgccagagtcttattgtgggcgatgaccagagtgggtttattgactttggaaatgacctgactcatggtataggtcttccctgtaccagtcgcccccatcagaatctgagctttttcgcccccctcgatattatcaaccaactgctcgatagcttggggttggtctcctgatggttcatattttgatactagtttaaattgattgtcagtaatgcgggtaatcataagaatcctctcttgatgtgctattcctattttagcatacttgtaacattttcacgaagaaaaggacggaccgaagtcacatcctttcattttctttctttaattgataagcgagatagacaatcagcagtagcaagatcagacttgtcatgatagatccttctatcccaaaagagccacctgatagccaatcttgattaccttgtggtaaaaaggtcatcaaagacgttcctgacggctgaccactaactaaaatcccaaaaagatttccctgagcaaaattccaagccccatgaatacctgctacaccccaaactgtatctgttttgaggaggtaaagtgacatggcaactccgaataaaaagagattcactagagatagaggggtgagaccagaatttcccgcatgaagcagggtaaagaacaggctagatataagaacagctagttttagattggttcttgaggccaattgaggaaggagccaagcacgggccaccacttcttctgttgtcccctgtaaaatccaaaatggaacggtaaaaatgacaaaggctagcgaataaggattcaagtgaatggactcaaaacgatattgccctaatgctactaaacctaacaaggtcagaagaaaaagtgccagacctataccaaatcctttaagaagattgctgaagaaattctctctataaaatcccaaggttcgaataggtcttttctcaacttttctagtccatctgaacacagtgttgagaacgaaaccaaaggacagcaattctaaaattaaacgaaagtcacttgttttatccgtcaagctctgaagcaaggtttgtaagaaggcagcaaaagcttgaccactctctccaaaatttctagcaagtccgatgagtgctaacaaactaataccatacaaagtataagccacaaactctcctacgaagacaaaaacaaaggctaacaagagacttgtgtaaatgtataaactcatttttgaagcttggaagtctttaaatatttttttgttcttcatatccctgtcctctttccttctattatatactattattatagcactttgtggtagcagttcaagaaagaaataaagagcttttatgttatatcttctaacataaaagtccctagatttgcatttttttgttttttctgatataatgggaaaatattcggaaaaggagactaaaaatgaagaaaaaatttctagcatttttgctaattttattcccaattttctcattaggtatcgcgaaagctgaaacgattaagattgtgtctgataccgcctatgcaccttttgagtttaaagattcagatcaaacttataaaggaattgatgttgacattatcaacaaagtcgctgagattaaaggatggaacattcagatgtcttatcctggttttgacgcagcggtaaatgcggttcaagctggtcaagctgacgctatcatggcagggatgacaaagactaaagaacgtgaaaaagtcttcaccatgtctgatacttactatgatacaaaagttgtcattgctactacaaaggcacacaaggattagtaaatatgaccaattaactggcaaaaccgttggtgttaaaaacggaactgctgctcaacgttttcttgaaacaatcaaagataaatacggctttactattaaaacatttgacactagtgatttgatgaacaacagcttgagtgctggtgccatcgatgccatgatggatgacaaacctgttatcgaatatgccattaaccaagggcaagacctccatattgaaatggatggtgaagctgtaggtagctttgctttcggtgttaaaaaaggtagcaaatacgagcacctagttactgaatttaaccaagccttggctgaaatgaaaaaagatggtagtcttgataaaatcatcaagaaatggactgcttcatcatcttcagcagtgccaactacaactactctagcaggcttaaaagccattcctgttaaagctaaatatatcattgccagcgattcttcttttgcaccttttgttttccaaaactcaagtaaccaatttactggtattgatatggaattgattaaggcaatcgctaaagaccaaggttttgaaattgaaatcaccaaccctggtttcgatgccgctatcagtgctgttcaagctggtcaagccgatggtatcattgctggtatgtctgtcacagatgctcgtaaggcaacttttgacttctcagaatcatactacactgctaatactatccttggtgtcaaagaatcaagcaccattgcttcctatgaagacttgaaagggaagacagttggtgttaaaaacggaactgcttctcaaaccttcctaacagaaaatcaaagcaaatacggttacaaaattaaaacctttgctgatggttcttcaatgtatgacagtttaaatactggagccatcgatgctgttatggatgatgagcctgtcctcaaatattctatcagccaaggacaaaaaattgaaaactccaatcgctggaactccaatcggtgaaacagcctttgctgttaaaaaaggagcaaatccacgaattgattgaaatgttcaataacggacttgcaaaccttaaagcaaacggtgaattccaaaagattcttgataaatacctagctagtgaatcatcaactgcttcaacaagcactgttgacgaaacaactatctggggcttgcttcaaaacaactacaaacaactccttagtggtcttggtatcactcttgctctagctcttatctcgtttgctattgccattgtcatcgggattatcttcggtatgtttagcgttagcccctacaaatctcttcgtgtgatctctgagattttcgttgacgttattcgtggtattccattgatgattcttgcagccttcatcttctggggaattccaaacttcatcgagtctatcacaggccaacaaagcccaattaacgactttgtagctggtactattgccctatcgctcaatgcagcggcttatatcgctgaaatcgttcgtggtggtattcaggccgttccagttggccaaatggaagccagccgaagcttgggtatctcttatggaaaaaccatgcgtaagattatcttgccacaagcaactaaattgatgttgccaaactttgttaaccaattcgttatcgctcttaaagatacaacaatcgtatctgctatcggtttggttgaactcttccaaactggtaagattatcattgcccgtaactaccaaagtttcaagatgtatgcaatccttgctatcttctatcttgtaattatcacacttttgactagactagcgaaacgcttagaaaagaggattcgttaatggcaaaactaaaaattgatgtaaatgatttacacaagcactatggaaaaaatgaagttttaaaaggaattacgactaaattctatgaaggagatgttgtttgtatcattggtccttcaggttctggtaaatcgaccttccttcgtagcctcaaccttctagaagaagttactagcggtcacatcactgtgaacggttatgacttaactgaaaaaacaaccaacgttgaccacgtccgtgaaaatatcggaatggttttccaacacttcaacctcttcccacacatgtctgtattggataacattacttttgctcctatcgagcacaagttgatgactaaggaagaagctgagaaattgggaatggagttgcttgacaaggttgggctagcagataaagctaatgctaatccagatagcctatcaggtggtcaaaaacaacgtgtggccatcgctcgtggacttgcaatgaacccagatatcatgctctttgatgaaccaacttcagcccttgaccctgagatggtcggagacgtactgaacgttatgaaggaattggctgagcaaggtatgaccatgattatcgtaacccatgaaatgggatttgcccgtcaagttgccaaccgcgttatctttactgcagacggtgaattcctagaagacggaacacctgatcaaatctttgataacccacaacacccacgtctgaaagagttcttggacaaggtcttaaacgtctaaactcaaactgtaaggatttccttacagtttttttctatctcgtattggattttttgatttttcggaaaattatgttagaattaagtttatgaaatgaggtttcctcatacctagcaagactaggaataaaaatagaaattaggtagctagatgtcatctaaggttattgttacaattttcggtgcgagtggagacctggctaaacgcaagctctacccttccctttttagactttataaatccggcaatctttccgagcactttgcagtcattggaactgctcgtcgttcttggagcaaggaatattttgaatctgttgtagtcgaatcgatccttgatttggcagatagtaccgaacaggctcaggagttcgctagccacttctactatcaaagtcatgatgtcaatgatacagagcactacattgctttgcgtcaattgcaggctgaactaaatgacaaataccaagctgaacacaacaagctcttcttcttgtctatggcacctcagttctttggaactatcgccaaacacctcaagtctgaaaacattgtggatggtaaaggttttgagcgcttaatcgttgaaaaaccatttggtacagattacgcaactgcaagcaagttgaatgacgagctcctagcaacatttgacgaagaacaaattttccgtattgaccattatcttggtaaggaaatgatccaaagtatctttgcagttcgctttgcaaacttgatttttgaaaatgtttggaacaaggattttatcgacaatgttcaaattacttttgcagagcgcttgggtgtagaagaacgtggtggctactatgaccaatctggtgccctccgcgacatggtacaaaaccatacactacaactgctttctctccttgccatggacaagccagcaagcttcacaaaagacgagattcgtgctgagaagattaaggtctttaaaaacctctatcacccaactgatgaagaacttaaagaatactttatccgtggtcaataccgctctggtaagattgatggcatgaaatatatctcttatcgtagtgaaccaaatgtgaatccagaatctacaactgaaacctttgcatctggtgccttctttgtaaacagcgatcgattccgtggcgttcctttcttcttccgtactggtaaacgtctgactgaaaaaggaactcatgtcaacatcgtctttaaacaaatggattctatctttggagaaccacttgctccaaacattttgaccatctatatccaaccaacagaaggcttctctcttagcctaaatgggaagcaagtaggagaagaatttaacttggctcctaactcacttgattaccgtacagatgcgactgcaactggtgcttccccagaaccatacgagaaattaatctatgatgtcttaaataacaactcaactaactttagccactgggatgaggttggtgcatcatggaaattgattgaccgtatcgaagaactctgggctgaaaatggtgccccacttcatgactataaagctggaagcatgggacctcaagcaagctttgacttacttgaaaaattcggtgctaaatggacttggcaaccagatatcgcttatcgtcaagatggtcgtttagaataaaaaaaatcctgcaagtttgtgccttgcaggatttttgcttctgattagattaagccttctaagagacccttcataaagttttctgagttaaactctccaatatcatcgattttttcaccaaaaccaatcaattttacaggaatattgagttcttcacggatggctaaaacaacaccacctcgagcagttccatcaatcttagtcaagacaattccagttaatggcgttatttttgaaaattctttggcctgtacaagagcgttttgacctgttgatgcatcaagtgccaagaaggtttcatgcggagcttctggcacaacacgtttgatgatacgaccaatcttttctagctcggccataaggttatccttattttgcagacgacctgcagtatcgatcatgagaatatcgataccttcagatacggcacgttccatgccatcaaagaccacactggctgggtcagctttttcagctccagttactactggaacatctacacgacggccccattctgctagctgggctactgcccctgcacggaaggtatctgccgcaaccaacatgactttcttgccagcttgtttgtagcggtgggctagtttcccgatagaagttgttttcccaacaccattgaccccgacaaagagcatgactgtcaagccatcttggaagtggattctttcatcgtagttaccatccttttcataaagctcaaccaatttctcaatgatgacacggcgaagtgcgtcaggtttcttggcgttttcaagcttggcttcgtagcgtagctcctctgttaagttagaagcgacctggacaccaacatcactcataattagcagttcttccagttcctcgaaaaattcttcatcaacagagcggaaattggcaaagaaggcattcaaacgagcaccaaatcctgtacgagttttcttgagactgcggtcatatttttcctgaacagtctcttctacttgagtcgtttctgcttcaagaacttcagaattattttcttctacagtctctaggagctccgtattctcttcctctgtgacttcttctgagtttggaaattcttctatttcttcttgagaaacttctacagttggttctgaatccagactttcttcaactgtgtcttgattttcctcttcttggagcagagcttcttcagaactttcaacttctgcttcttcatgaggaagttcctcagcttctgttaaggctggctcaacatcttcagacaaatcaagattttccagagcttcttttacaacttcttcgattttaggttcttctttttttccgaatagacggtcaaacaatcccatatcttagttctcctttagcacatattcttcgatagcccaggcgacagcttcctcatcattggtcattggggtcaccacatttgcgactgccttgacttcaggaacagcgttttgcatggcaacaccgagccctgcccattcaatcatagaaaggtcattggcttcatcaccacaggccatcacttggctttggtcaattccaagatgactgattagtttagccaaaccggttgctttgtgtacattctttggtgaccactctagcaacatttcacgtgatttaaagatttcatattggtcaaacaattctggtgaaatcttttgaatggctgcatccaagggttcttgagcaaaggcagtcacgcatttattgtaggtcatttgactagacaggtcttcaaagtcaactggtacaaaagttaaagctggattgaatttggcataaagactttcttggtccgattggatttgataaacagttccttctgagatggcgtcaagaggcagtgacaatttctctgtttcttcatacaagcgtgccacatcatcatatgaaaagactgttttatcaaggatttcacctgtatttttctgaaccaaaccaccattaaaggtaatggtatactcatcttcatgaccgtcagtccccaactcatggagaaagaaatccatagcttttaagggacgaccagttgtcaatacaactttaataccacgatcacgcgcagctttcaaggttgccttggtacgatccgtcagctttttatcagtagtcagcaaggtcccgtccaagtccaatgcaatcaattttatatctgccattataagccctccatataagctataaccgactggtctttatggtgaccaatcacagtctctgctaattctaaaatttctggtcgtgcattttcaggagctacaggatgtcccacaacctgcatcatgtgcaagtcatttagattgtctccaaaagccatgacctgatccatcgtgatgctaagttttttagctaattcaacaatggctactcccttatcgacatagtccagaacaatatcaatggattcaaagccagttgtcatggccttaacaccaggaacgttttcgtttacccaagcttcaccagcttcaagggtttcttctgtgaagttggttgtaaatttgaaaatatcatctgtgatatcttctaaactcgctactttttggatattttcattataatgttggctctctttcaaataggtctcatcaaccgtatctagcacataagagcccttcttacccgtcaagagcaatttattgatatctacataaggtgacgttttcagcctttcaaaagttgatagataaaactcacgagacatggtcgcttcatacaagtcttgacctcgatactctaccaaactgccattttccgcgatgaaaatgatgtcatcacgaacatcagcaaataatttttctagagataaaaatccgcgccccgaagctaccgcaaagtaaatcccttttttcttgtaggaaaccaagagagacttgaggcggtccatatcaaagcgtccattcccatctaggaaggttccgtccatatccgttgctactagtttaattgtcatccttcaatactttctaaatcttttaacttcaccgaaacaatttttgagacacctgattcttgcatggtcactccatagatagaatcagccgctgccatggttcctttacggtgggttacgacgatgaactggctgtccttgtcaaagcggttgaggtaatccccgaaacgtttaacattggcttcgtcaagcgcagcctctacctcatccaaaatcacaaatggaatagtcttaactctaataatagagaaaagcaaggctagagctgatagggctttttccccaccactcatgaggttgagggactggattttcttgcctggtggttgaacagaaatctcaaccccagctgtcagcaagtctccttcagtcaaaatcaggtctgcttgacccccaccaaacatctgcttgaaagttactttaaaggactcacgaatagcttcaaaggttgatttaaagcgttccttgacctcatcattcatctctgtaatggtttcaagcagcaagtttttcgccgacaaaatgtcatctcgctggctatttaggaaatccagacgattgtgaacttcttcgtactggtcaatagcttccaagttgaccggacccagtgaacgaatagccttctctaaatccttaacttcctcctctgccagattgagattttcaagttcatgagccttttctagtgcttcagtatagctaatctgatactgatctgttaattggctttgtaaatggcgtaagcgctcgctaaccttttctttcttagcttcagcacgtgtttgcttgcgaatccactcctcattatgttggcgagcttggtccaaatgactagcaatatcatccagtttaccttcaatatcatccaactcaaactgcttgcgaatcaaaccttgttggagatttgttttctggtttttggcttcttcagcctgttgactgagcaattctgtatcaaccttctccagattatcaaccttttcttgaagaaggcgctggatttcctcttgttcgatatctagattattcaattccttgcctagacggtcaatatcagccacttcataacgtttttgcccttgcagttctgtcttaagcaagcgaacttgcgctacctgttcttgcaagttttgatagcgttcttggatggcatttttgttagacttaatctcttcaatctcagcttccagattttgcttgtcactggcgattgtagtaaggcgctcttggcatttttccttatccgcttgccaatctccctcagaaagacgatttaattcctcttcttggagtttccaaagagtttccagttcatcaacttgctgactggtctgctggtaagagagggataagccctgctcctgaatacgtgcctgttctccctgagatttaatagcttctaatctttctgtcaatctagccatctggtcttgcaaggtcttcaaagccacttcttctgaacgaagacttgcttcctcttcagcaatttctttttgtaattgctccagttctggcttgataaaaatactgttgttctggcgattggctccacctgcataggaaccacctgtgcgcagctctgtcccatccagtgtcaccatgcgaacctgataacgaacgtgacgagctgctgcacgcgcatgttccacggtatcaaaaatagccgtcgtagctagcaaattcttaaaaatagcttccagtctagtgtcgaatgtcaccaactcatctgccatcccaaggaaacctgggcttgcagcaatagcatcttgattctgactagaaatcgtacgcgccttgatcgttgtcaacggaaggaaggttgcacgaccagccctgtttcgtttaaggaaatcaatcgccttggttgccgcgttttcatcttccacgatgatatgctgactgctggctccaagcgcaatctctagggcaatttgataatgcacatcaaaggtcagatgctcactaactgcaccaataattccaccaaggcgggctttttcttggagaacactcttaacacctgcataaaagttactatgatttctgaggatattttccaaactttgggctctagcctgcttgtttttgagattatccagacgggcaaagagttgattttgttgagcctgataggaagatttctgattctcttgctccttggcaatagcttggtagtcagccaataatttctgaacatgctccttggcagcttcaagctcgtctttttgctgactagccttctctttagctgtagccagctgttctttcagcttttctaattgatctgcttgtttttgagaaagctgacgactattttccaactcattctcgatgcgagtcagttggtttgagacatcagcttcttcttgtagaagagctacaaagcgttcacgtaagagttcaatcatctgatcaggatcatctgaaaaagctagcaattcagcttctaaacgattgagtttttgattattttggactagattttcctctaacagagttaatgagctttctttatcagatttttcttggctgagtaaatttctcttatcctccaaagcagccaaacgagcttgtgcttcctgttgattcagggctacttgttcagattctaatttcgatagggctaattttctctctaaatcactaatcagactggtcaaatccatcaaactgccttggtctttggccatttcagcctgtaaatcttggcgttgctttttaagagtatgattttcttcctctaatttttcacgcttttggtaataactagtcaatagttcctgaacctgtgccaactcttcttctgtcaaatctagttcagccttattttccttgatttgagcagctaaaacatccaagtaaatagctttacgttggccttccaaatctagaaacttacgagcattttcagcttgcttctcaagaggcttgatttgattgtccaactcatagataatgtcttctagacgatccagattatcctgggtttgctgcagtttactctcagtttcttttctgcgagtcttgtattttaaaactccagcagcttcttcaaaaatagctcggcgttcctcaggcttagagttgaaaatctcctcaaccttcccttgggaaatgatagagaaggaatctcgtcccaatccagtatccaagaaaaggtcatgaatatcacgcagacggactttcttgccgtcaatcttgtattcgctatctccactgcgatagatatgacgttctaccctgatttcttgacctgcatccttgataaatccgtcatgattatccaaagtcacaactacagaagcataattgagcggtttgcgactttctgttccagcaaagataacatccggcatcttgccaccacggagactcttgacactagactcccccaaagcccaacgcagactttctgtaatattcgactttccagatccattgggcccaacaactgccgtcacaccttggtcaaagactaccttagtcttatcagcaaaagacttgaatccctgaatttcgatttcctttaaatacatgaatccagccctttctcaacggcatttttggcagcttcctgctctgctagtttcttagaacgaccttgaccttgaccaatgctcttaccttcaacaagaacttctacttcaaaaaccttatcgtgggcaggacccgtttcagaaattacctgataacgaatagccacatccccattgacctgaagcaactcttggagatgggttttgtagtctgtaatcatctcaaattcgcctgcttcaaccttaggaatcatgacttgatagataaattccttgactttggccacatccttgtccaaaaggagggcaccaagaaaggcctcaaaggcatcaccaagaatggtatcacgattgcgaccaccagatttttcttcccccttacccagcttgataaactgatcaaactgacaatcacgcgcaaaaccagccaaactctcctcacggacaatcatagcacggagtttagataagtcaccctcaggctttttaggatattttttatacagatattctgaaatcaatagctgtagaacagcgtctcctaaaaattccaagcgttcattgtgtgaaatttttaagaggcggtgctcattggcataactcgtatgagtaaaggcagtctccagtaaatttttgtctgcaaattcgattgcaaaatggttctttagtacagtttgtaattctttcataccaacctctttctaactgataacagtcctttttattatatcaaaaaaagccccctgagtcactttaaaacgggactggagagcatttgggaattctttaaaaagagattttcagttttaagggccaatttagggctgtgtaaagaaaaaagccctattaaaggctttttaggatgtttacatccaccctgagggaatcgaacccccatctcaagaaccggaatcttacgtgatatccattacactaagggtggaaacttgttttattataacagaaatttgctctaataacaagtttttttctagtgagatagcccgtcttagtgggaagcatccccattccagatggagtttttcacgataacataatcaacgtgtttaaggtcagcaacctgacgtccacctgcataagaaatagcactttgaaggtcttgttccatctcagttaaagtgtcttgcagatgacctttagcaggaagcaagatacgtttgccttccacatttttgtaagcacctttttgatattgtgaggctgaaccataatattctttgaactgttcaccatcgacttcaatcgttttccctggactttcaatatgtcctgcaaagagggaaccaatcatgaccatgctagcaccgaagcggatagacttggcaatatcaccgtgagtacgaattcctccatcagcaataatcggtttacgtgcagccttggcacaccaacgaagggcagccaattgccaaccacctgtaccaaaacctgtcttgaccttggtgatacaaaccttacctggaccgattccgaccttagtagcatccgcaccagcattttccaattcacgcacagcttctggtgttcccacatttcctgcaatgacaaaggtatctggcaattctttcttgatgtgttgaatcatagaaatcacgctatccgcatgaccgtgggcaatgtcaatcgtgatgtactcaggagcatcagatttgagctggctaacgaaatcatactcataatccttaacaccgacagagatagaagcaataagcccttgctcatgcatgcgcttaataaaaggaatacgtcctgcctcatcaaaacggtgcataatgtagaagtaaccacctttagccagttgctctgctacattttcatccaaaatcgtttgcatattagctggcacaacaggtagtttaaaggtgtgatttcctaaagtgacacttgtatccgcttctgcacggcttttaatgacacatttatttggaatcaattgaatatcttcgtaatcaaaaattggaaattcatttaacatatcgatgtctcgtttcttttgtaatgacctacctatgcttgcgcatctctacgccttttccgacgtttccttaattaattataaatcaaagtacagattttgtcaaataattttataaattaaaatataatgttcggatttttcttgcgtaaatagaaaaaagaggggaaattgttttctccccactccttctctattctaataatactcaccctggcggtagtcccatgagttaaaggtgtctgaaaggtgcatcatgattttatcaatgtcaagtcctttacgaatcacaactggtgctggtgaagttgagcgagctcctccttgttctgggatgagtttgccgtccttatcgaccatagacaccatcacaccttgctcatagcgagtttcaatcgttttgtcaggctggatagaagcaacgtagtcatctgcctcgataacaaggtccactgctccttcgatacgttctccaataccttctactttaccacggtttccttttccagatgggttagctgatgaggcataaaccatcttgccttcttcccaaagtttggcagccaattgttcaccagctttaccaaatttgataacaaaacagctcgttccacgcacgtcagtcatcagctcttcacgaccatcaccgtatgctttgagtttttcaaaagcttctggtttccaaggaaggatacaaccaagaagaatatcttcatcccaatgtttttggtagaaggcttcaatttctgggttaagttgtgctaaagcacgaagctcatccatgctaccgcagagaacaacacctggtttgttacggttacgctctttggctgcgaacttacgctcaagtcctgccttatcgctggtcatgataatgtaaccaactttagtagggcaaacgatacatccgccctcaccttttaaaatgtcatagccttcttgtgaaagtgttccgttccattgaatgtgttttgtcatagttctatttccttttctaattttcttctaatcctgccagtaggctggtcgttgtttttcataggcagcaatcaaatcttcatactgcaaggtaattccgatatcatccaaaccatttgagagcttgtgtttccactcgctatcaatttcaaaagtgaactctccaaccggtgagatgattttctgttgttccaagtccacagttacctggtcagtcggtttgagctgggctagcttttctctaacctctctaggctgaacaataggcaacatgccattattgagttcattattgtaatgaatatccccaaaagatcctgcaatcacgaccttaaaaccatagtctgctaaggcccaagctgcatgttccctcgaagaacctgccccaaagttatcccctgagataagaatactggctttacgatattcaggctgattaaagacaaagtcaggatcctcagtatacttgtcgtccagataacgccaagcatacatgaggtacttaccaaagccttttttatcaatcaacttgagaaactgcttgggtaggatttggtcggtgtcgatattatcattcatgagaggaacggtcgttcccgtataaactgtaaatttctccatatcctctccttactgggcttctggcatttgccgaacatctacgaaacgccctgcaatagctgccgcagctgccatagctggactacagagatgagtcttagcgccaaagccttgtctgtcttcaaagtttcgattgctggttgaggcgcagtgaacaccatcagggaccttgtctggattcatccctaggcacatagaacaacctggatctctccactcaaaaccagcgtctaggaaaaccttgtccaagcccaacttctcagcagctcgtttgacaggacgagagcctgggactacgatagccgttaagttaggagcaatcttcttccctttaacaaatcgcgcagccagttgcaagtcgctgagacgagcattagtacaagaaccgataaagatatagcctagttcaatatcagctggcttttgaccaggctccaagtccatgtaattgtaggctcgctcatcattcatatccttaatttctgggaatctactgtcaaagtcaacccccatagcagggttggttccccaggtcaccataggagccaagtctgaaacatccatctggataaccttatcgtaaacgacattctcatcactgacaagggtcttccaatctgccacagcctcttcaaagtcctctggaacacattcccgtcctttgagataatcataggtggtttgatctggattcatgattcccatcttggatccaaactcgatggacatattgcagatggtcattcgttcttccatgctcagtgcatcaatagcttgtccacgatattccaccacgtagccaacgccgcaagcaacgccgtacttggcaatcaaagctaaaatgaaatccttggaataaactcctttttgaggaacaccagtgaattccaccagcattttcttgggtttgacctgccagagggtctgtgtcgcaaagacatgttcgacctcactggtcccaattccaaaagcgattgctccgaaagccccgtgggttgctgtatggctatccccacagacgatgaatttccctggttgagttcttcctgtttctggaccaaccatgtgaacgattccttgcttttcagaaccgtgggcagcatgttcgatcccaaattcctcaacattttcagcaagcttatcaatttgtaccttagaaatcacatctcgaatatcgtagatattgactgtcgggacattgtggtcaaaggttccaaatgtcaagtctggtcgtctcaatctacgacctgcgtctcgtaatccttgaaatgcctgagggctggtcacttcatgaatatagtgctggtccacatacatgagttggggttgcccctcttctcctgtgatgacatgacggtcccacaatttatcaaaaatcgattttcctgccatccattacctccaaataaaatataaggctactagtgtggtcaccatcccaagaaaccaaactgttttaaagtaccattttcgagtcttgtgatgaaagatgattcctgctaaccaagcaccaaaaccaccacaagtaaaggctaaaataagtaagattttctcagggatgcgccaagctcttctcctcgccttggatttgtcaatgccataaatcaagaaaatgatgacattccaaatcaaaaggactagagtaattttttcgtctaacttcataaccttgcgataatagcttccgtcatttccttggtcgaagcctgtcctcctatatctctcgttaatgtaccagctgccaaacttgcctcaacagcacgctcgacacgctctgcatcctcataacgtccaaagctgtctctcagcatcatggccactgataaaatcatggaaataggattggcaattccttgacctgcaatatcaggtgctgaaccgtgaataggttcatagagacttggtccattttcagaatgactggctgatggcataaccccaagtgtgccagatagaacgcttgattcatcagatagaatatctccgaaaagattctccgtcacgatgacatcaaacttagcaggattagtaatcataagcatggaagctgagtcgactagctggtgttccaaggtcacatcttggaaatcctttgcgaccttctcagctactttccgccagagttttgatgttgccaacacgttttgcttatcaatactggtaaggatttttctccgacttcttgcgatttcaaaggctttgcgaataatccgctccacttcctcatagctatagtcgttgatatcacgcgcttttctttcttcaagaatatgatccccaaaataaatcccacctgtcaactcccgtaccacaacaaagtctacaccagcaattcgttccggtttgagtggtgacaaatgcttgagactgtcaaagatttttacagggcgaatattggcatagagattgagttccttacggagagctagcaagccttgttcagggcgaaccgctgctccatcatactgaggactaccgatagccgctaggagaatggcatctgtttctctacatgctttgagggtttcactaggtaaaggatggcctgctgcatcaattcctgcacctccaaaaggtcgtttgtctatttcatagtcaaagcctgttttttcagctagagcttccaaaacttctaaaccagcctccatgatttctgggccgattccatcccctgccagaactactattttctttgtcatagctttctcctttacacactaggcatatcacgataggaaacactgcgtcccatctcaccagcattctctttttgaacaaaggtattagcattgatgtaggcaatagcagatgctttcagtacatcgaaatcaagccctgctgcattaaagatggtttctgtatctctgttttcaacagtgaccaaaacccgagcttgggcatcaattccatctgtcacagcgtcaatagtataggacaccaagcggacggattggttaaagaacttatcgatagcgttaaagattgcttcaacagaaccttgccctgacgcattgaaatcaactttctcaccatccatattggctaggctaacgagtgcttcaatgtcattatctgcatgagtttgaagttgtaaatcatcaaagtggaagccttctggattttcaaccatggttccagctaccagagcacgaatatctgcatctgtgatttcttgtttcttgtcggccaatgccttgaacttagcaaagagtggtttgatatcctcttctgtaaagtctaaggccagttctcttagtttttcaacaaaggcatggcgacctgacaattttccaagtgggaggctgttactcttgacaccgaccaattcaggggtgataatctcataagtaagaggatttttaaggactccgtcttggtgaataccagattcatgagaaaaggcattgccaccaacaacggccttgtttttaggaactgggatacctgagaagcgagaaaccatttctgacgtattgatggtttcatttaaaacaatactagtttctgcttgatagtaatcttgacgaatactgagggccactgcaatttcttccaaagcagcattaccagctcgctccccgataccattgatagtcccttcaacacgtcctgctccgttcttgacagcagcaaggctattagctactgccattccaaggtcatcatgacagtgaggcgaatagataatctgacgttccgtcttgacattctcaatcaagtatttgaagatagctccgtattcctctggtgtggtaaatcctaccgtatcagggatattgatataagatgcacctgcatcgaccgctgtttgaacaacttgcaggaggaaatccaactccgttctggtcgcatcttcaggagagaattcgaccacttcaaacttggaacgtgcataagagacatgctcactgattgcttccaaaatctcttccttgctcttattgagcttatacttacggtgaatcggactggtagcgataaagacgtgaacctgtggatacttggcatccttgagagcttcataacaagcatcaatatcagatttgacagagcgtgccagaccagttaccgctgttttcttcaagactttggcaatctcctgaactgctgtgaatgaatcaggactcgccgctggaaaaccagcttcgatggctgaaataccccatttctccagctgtcttgcaatggcaattttttccttgattgaaaagttaacacccggtgtctgttctccatcccgaaggctggtatctagaaattcaactgttctcataagatttccccttttccaaatgtggttttaaaaaaacatctcgctcagaagtccaagcgagatgttgattcactcccgcttggtaagccaaacaggactaatgctttttgcactagcccgagtacctcaacaacaaagcaaattgattaaacttagctgttttcatgtttgactttctccttcgtttgatatcttgtttagtattttagcataggcaaaagtacttgtcaagaaaaaaattcaatattttctgaaaatttcttcagtagagaatattttgctaattgaaagttcttgaaaaatcttgaaatgtttcattttttagtggttaagttccaacttttttccatcaattccagtacttcttcatctgataaagtatcatcaagcgccacactaatccagtaacgtttattcatatgaaaagctggataaatgcccttgtgtgaaagcaaatcagctacttggtcatgcttgaggttgactgcttccatttgtccctctcttcctttttccagcttatcccaagagattttcatcaaaacggcataccacttttgattgccttcatgtcttaacactgccgtatcaggcgatttctcccacaaatactccaactgattaccatacttttcctgaacttgagtcatgattcgtttagtctgaggacagatataatcctgcacatcaaaacaagccttccgaatctggtagagaatctccagacaagcctcacggacacttgcaacaaaacttcctttaaaactttccatatagacttgaggatagaggtcaccagtctcctggtcaaagacttgaaaactcacattatcagcagtgatggacaaaaccatgacaaagtcaccttgcaaaatctggcaactataggtccagactccactattttctacaaaaccataagcatgagctttttcttgattaaactgataggatttaaaaatttcaaacataagtgaaaactgctaccctaagcagcagttcctttctattttttaaaagacaaccttagttccgtgcaattgtgtcacacctagctgatcgataaaggtttgacggttgtcaaggtcaatccccccaccaggtagaatttcaattttacctttagcacgctccaaaattctgtgatagcgagcaaagcgtttctctagcgagtctccagacacacccgcacgagtcaggattcgagtgattccagcttgactgagccagtcaatagcttccagttgatcttcatcgctcaattcatcaaaggccatgtgaaagacaatttccatcccttttgatgcagtaattaacttttcaagattaggtttatccaacttcttatcagcagttaaaaccccaaatacaactccttgacttccagactgagcagtcaaacgaatatcttctagcataatagcaatttctaggtcattatagacaaagtcgccaccacgtggacgaatcatggtcatgatggtcgtattgtagttagctgccaattcaaccgctgccttggttactccatagcttggtgttgtcccaccaactgcaagattatcacagagttcgattcgacgagctccagcctgcatcgctttttcaagcaaggtcacattttcagcacaaaattcgtaaatcatttgattctccttgagtattactttgaatttattatatcatattgttgtgaatatgctttcaattttatcaaggcaaataactactattttaactattctttgtctggaatgaccttgaaaagataataggtgataaagatggtcaaagcaccaagaccgattttgactggtaaaagaggggcaaaataaatggaaattcccattaagatgtagatagatacgatgatttttttctttcgttcacgcgcaatagacttagtctcgcgaaaatcagcaacatatgcttgatagagcttggtatggtaaagccaatcttcgaagcgcttagaacttctggagaaacaagcaatagacaacaaaagaaaaggcgttgtaggcaacaagggtaaaacgaccccaacaatagccaaggccagcgataaaaaaccaataataagataaataatacgcataactactcctagttaatactcttcgaaaatctcttcaaaccgcgtcaacgtcgccttgacgtaggtatggttcctgacttcgtcagtcttatctgcaatctcaaagcagtgctttgagcaacctgcagctagtttcctagtttgttctttgattttcattgagtataaaataatcttcttctagtttcgcatacaatggtgaattttgtcaagttctaaccaaaagagcctgaaatttactttcgggctcctcctcttatttaatcttttcttcttcgtagtcgccattactacatacaacctgcttaccaccaccacggacttttttctccataaggaagttgccacattttggacagtcacgaccaacaggcttatcccaagaggtaaattcacagtctggatagcgattgcaaccatagaagaggcggttacgttttgttttacgttcaataatttgtccctgatgacaacttggacactcaacaccaatctctttcacgattgcttgggtatgacggcaatctgggaaattgctacaagcgtagaacttaccaaaacgaccaagtttaatgaccattggactgccacacacttcacagtcaaatccagctggttcatccttaatctggattttctccatttcttcttcagccttggcaacctctttagagaatggtttgtaaaaggcatcaatgacacgttgccactgctcttttccgacttcgacatcatccagtttgccttccatttcagctgtaaaggtcacgtttacgatatctgggaaatattcaacgatgagcttattaacaatttctcccaactctgtcggttcaaagcgtttggctgcaaggcgaacataataacgtttctgaatggtttcaattgttggtgcgtaggttgacggacggccaaccccattttcctccaaggtcttgatcagtgtcgcttcagaatagcgagcaggcggttgagtgaaatgttgctctggtttgctatttacctgcttgactacatctccaacagccatgtccggtaacatcttattcttgtcagaatcattataaatggcaagataaccatcaaacttaacctgactaccattggcagcaaattgaactccattttgcgacaatttaacagccatagtatcaaagacagcagctgtcatctggctagccacaaaacgattccagataagggtatagagcttgagctggtccttgtccagatacttagcaatactttcaggtgtattaaaaacgctagacgggcgaatagcctcatgggcatcctgagcacctgaagcatttttaaccttgctaccatgcttagaatacttgctaccaaaacgatccgtaatgaaacttgcagcttcattttgggctacaggactgatacgggtcgaatcagtacgcatataagtaatcaaaccttggacaccagaaccaatattaatcccttcatagagctgttgggcaaccatcatggtctttcgagtacggaaattgattttattggcagcatccatctgcatagatgaagtagtataaggtaatggagcattgcgtttgcgctctttcttatccacctgatccactgaaaagtctttactagtcagacgagacaagacttccttgacctcatcattgctagtcagtttcagctttttgccatctactccatagaaggatgcctgaaattgcttggttccctttttaaagacaccatcaattgtccagtattcttcaggctgaaagacattaatttcattctcacggtcaatgattaacttaagcgcaatagattgaacgcgccctgctgataagcccttcttgaccttcttccacaaaataggcgaaatcgaatagcctaccaaacggtctaggacacgacgagcctgttgggcatcgaccaagtccatatcaatcttacgaggttctttaaaagcatttttgaccgcatccttggtgatttcattgaagaccacacggttggcatcattttcatctaagttgagaatatgggccaaatgccaagaaatcgcttctccttcacggtccgggtcactcgccaggaagactttattagcttttttggcttctttttttaagtcattgatgagagggccctttcctcgaatattgatatattgcggttcataattattttcaatatcgacagacatactggatttcttcaaatcacggatatgcccgacactggctaaaaccttgtagtttctgcctagatatttttcaatcgtcttggccttagcaggcgactccacgattactagattttttttaactgttgattttttcttttttgttgccgtagccacagtatcacaccttttcaaagtaataaactttataaagtgtaaaccattttgccataactgtcaagacttagctactatatatagaagaaaagtttatctagtaagcggactttcttcttatactcaatgaaaatcaaagagcaaactaggaaactaaccgcaggttgctcaaagcactgctttgaggttgcagatgagactgacgaagtcagtaaccatacctacggcaaggtgatgctgacgtggtttgaagagattttcgaagagtattaaaattcaaattccgcaagaacatcctgcccgctggtgaccaattttgccccttcttgaatcaaatgatggcaaccgtctgatagtccatctaaaatgctaccaggaatagcaaagacatcgcgcccttcttccattgctctctcacaggtaatgagactacctgaacgcatcttagcctctgctacaatcacaccacgacaaagtccagcaatgatacgattacgggcaggaaaatgaaatttcagaggttgttcaccaggtccgtattcacttagaaccagatggtcattgccgatgtagtcttgcaagcgtttattggctttaggataaaacacatccagtcctgttccaatcactgcaatggtttttccgccattctgaagagctgccatatgagctgctgtgtcaatgcccttggctaagccactgacgataaccagttcattttccaagccctgaatgactttttcaactgacttagctccctgtttgctacacgcacgactgcccacgactgctaccttcgggaatttcaagaggtcaagatttcccttgtaaaataaaagtacaggcgcatcatatatttcactcaaatcccaagggtaacagtcatctaaaatagagaaagatggaaatttttgaaactccttctccaaatgcgcatcgtctatctgaaagtaacgttccataaaaacagctggatttctgcaacctgatatttctgcaatatcacccaacaaaagttcttgatcgacattttcaccgtattctagaactgccaaaacctgttgattggtcaaacctgattttttcaatttatagatttcatagtttgtgattttcataaataactccatttctttttctactcatctatttattcgtaaaaaaatcaaaaaacatccgactatttcagccagatgttggaatctttaattttcgtttttaagaatttcttctaatttatgataatcttggacactatcgatttcatagatgctattgccttctaattcttcaacatagacatccagctctttgatattatccttaaccatattatcccagtagagatcaacaaattcaccacttgcataggccttatcgataaagctgacaatcttttctgcagttggagcatcccagaaggatacaccactaaggatgcgacccgccttgctatcaacaataatgtcttgaaccttgtagtcatctccatagaccaagaaccattcgttggtacaatcttcacgataaacactaaaataagtcgaacgtgtcaaatcattgcggaacatatttttaaagagataattatcggcatcaataacataactgttagctaattcttcttttacaagatagagagagtaaaagttattgtagtcagcgtatttatcattgaagacgaggcgaacaccatatttttctttcaagtaatcgaattgttctttaaggtaaccaacaatgatgatgatttcattgattcctttttcttttaaaaactcaatttggtattcaatcaagggtttttgattaacctgaaccaaggctttaggggtattttcagtcataggacgcaagcgagttcccaatcccgctgctaagataatggctttcacacgaatctcctttattctttaataataatataaactccagcaatgacgacaagtgacgtaataattgtcagcatatctagcggtgcacccaagaaaacaactgcaaataagactgtccaaactacataactcacgttcaagcctgtagccttggctggttgcaagcgattgatagcgatataataagccaaataggaaatcatatcaaaggctgcaaagacaatcataagacctagcaattgtccattggccacttctgcaaatgactgatgagagaagagcacaatcacaagataggacaagaatgaagttacttgacggattaagagggcttcgatttcactcaattcactttccatggcaaaagagctaagaacactctcacttccccatgcaatagcacaaaccaaagcacagagaatcccaatgtagaaggaattgacctgttcaaccttataggtctgagcaataatccctgcaatartcaagacaatcccaaatacagtattttttgaaatcttgtgcttcaaaaagaagaaagccaataaaaccgaaatcgcagggtaaatagycgacacagatgaagctaaggaacttccgatatacttaaccgcataaagattggcctgcataccgatagggcctgctaataaggctccgataataacactaacattgcgaatatttaagaaarttgagagacgaactttcccttcttttatcaaaagaaaagctagtaagataaagatactcaagaaatcgtgagcagcagccaccacaaagggcgacaaatctgtaaaaatcgaaaagatataagcactaatcgttagacccaacccccagaaaatacctgagagtagaccaaaagaaactccatttttatttttcatctgaacctccataataagctaaacctttaacagctctttggtaacgacttacaccatagtcaccaaaatctgcaccttgctcttccttatagacagtccataaactccaaatagtatcttgtaaaattttataaatagtaatcttttctcgagagacaggtgttttgtcactttcataatgtgacaagaagacttcttcctcttggggagtgaattcagactctaaaaagagggcagctaaatcccacattggatcgttcattgatgaatattcccagtcaatcagatatagacgtccttgaggtgattcgataaagttttcaggcaccaaatcgatgtgacaagattttctgtcaacacctaagtcagccagtcttttctctaaggagaagacttcttctcgaactgcttcatagttagcatacgggattttttcttcaattaaggattcgtattttttgatttcttcaaaaggagcaaattctccccttaattccttaccagatgcatgaatggtttgtaatattagagcaattttgtcaaatttagtcttgattgacgttgaatcaagcgtaatcgcagattcgatatactcatttactttgataccagcttcaatatcaaaaagataattttttacatctaagtctaaatcctttagtagttcaagattgtacttttcatcttgacgattgataagcttttctgtccctttaccaaagaacttaacaatgtattgcttatttgttgttttgaccaaatagttttgattggtcattccccccaattgttcaacactgaggacttcctcttcttgactaagtaaggaagaaattttctctttaatgattttctccacaattaacctccagttcttatacttcccatttaaacacggttttaaaggctgtgtttaaatcggttgcaaagacacggtgaatatctttaatttctcttacaggttcttctagataaaggatatttttaagacgattggcaaatttcttgacttccatcatttggattgcattttcaaaatcaatgcgaccagaacgagaggaaccaaccaagagcaagcctttttctaaggcatcgcgtgtattgagattgactttatactcactaactcccatcataagaatcgttccctgaggacgaatatagcgaaccaaatcattaatagctggtccagtaccatcaccaccacaacactcaaaagcatggtcaaaggccaaatcttcaggaatattatcagtaatatagcattctttggcaaaagagaagagttccaacttttcccaatgacgaccaataaccacgatctctgcttctggcaaagtatagttgataatattggcaaccacaaatgctaaacttccatctccgataacggcgattcggtcccgcttgctatgagcaagggtcaataggcgattcatggcatgcataccgacactgacaaactctgtaatggctgcaaccgtatcttcgatagcatcataagccaccacacgatctttagggagagaaacaaactctctcataaagccatcaaagccactagacaagaaatgggtccctgtcatgtagttttcatagaattcttcatcactctgcataggtggctgattaggaatcatgacaactttttgtccaacttcataggttcctgtcggatcagaaataacggttccacatgactcgtgaatcattgccattggaagttttttattcaaaatctttggatcacgttttccctggtagtaacgctgatccgcatgacagacagccatgtagttgggacggataaggatatgattttcttggtcaatagcctcttcttgatattttacattgataaacttaggcttagttagttgataaatttgattaatcattttactagtctttctcaatcatactttttgcaatcttcaaatctgttacggttgtaattttcagatttgaatattcacccttggccaaggccacatcttttcctttaatgacaaagattttacatgcatctgtcaagatttctttctcttcagcagaaagagagccataaaggtccaggaaatccttgcaacggaatgtttgaggtgtttgtccttgataaaggtgagcacgatttggaatatctgtaataaattgaccattggtactttcaacgatagtatcaaccgcttctaccactgtgtccactgcatcatgattttgggcaagttggatattgtcttgaatcatgcgaagtgtaataaatggacgaacagaatcgtgggtaacaacgatatcctctggagtaagcggacgataagcatcaatggcttcaatgattttctcaatacttgtattgcggtcagcaccaccttttgtaatgatgatacgttccttatgaagaggaagatatttatctacaagatcttctgcatgagaaacccagtctccatgaaccccaactacaattttttcgatacttggttccaagacaaatttttcaattgtatgaatcaagataggtcgatcacctaactctaaaaattgttttggcaagttactgattcccatgcgtgtgccagttccaccagcaagaattcctgcataaatcatctattttctcctttgtcttactaaaaaaacttattctctctattataccacaatctagtcctatcataaaagaaatactagtcgtcccgttctagaataggaggattatgcagttccattattcaaagaaactagtccatttctagtaatgactaggaattctgtagtcattaccaataaatagctgtgaaattttagagttcttcagaataatatagttttcttaaagaaagcttaaaatcaaactttgaaacttcaaagtgattacttgacttactgcccttcatttcttattagctaactttatgatataatgaaaaacgaggtaaattgaatgaaaagtataaaattaaatgctctatcttatatgggaattcgtgtcttgaatattatttttcccatcttaactggtacctacgtcgcgcgtgtcttagaccgaactgactatggttacttcaactctgtcgacacaattttgtcatttttcttaccctttgcaacttatggagtctataactacggtttacgggccatcagtaatgtcaaggataacaaaaaagatctgaatagaaccttctccagtcttttttatttgtgcatagcttgtacgattttgaccaccgctgtctatatccttgcctatcctctcttctttacagataatccaatcgtcaaaaaagtctaccttgttatggggattcaactcattgcccagattttttcaatcgaatgggttaatgaagctctggaaaattacagttttcttttttacaagactgccttcatccgcatcctgatgctggtctctattttcctgtttgtcaaaaatgaacatgatattgttgtctatacacttgtgatgagtttatcgacactgattaactatctgattagttatttttggattaaaagagacattaagcttgttaagattcacataagtgattttaaaccgctctttctccctctaacagccatgttggtctttgccaatgccaatatgctcttcacttttttggatcgcctcttcctcgttaaaacagggattgatgtcaacgttagttactataccatggctcaacgaattgtgaccgttatagctggtgttgtaacaggagctatcggagtgagtgtgcctcgtctcagttactatttgggtaaaggagacaaagaagcctatgtttctctggttaacagaggaagtcgaatctttaacttctttatcatcccactcagttttggactcatggttttaggaccaaatgccattctactttacggtagtgaaaaatatatcggaggtggtatcttaacctctctcttcgcttttcgtacgattatcctggccttagataccattcttggttcccaaattctctttacaaatggctatgaaaaacgtatcacagtttacacagtctttgctgggctactcaatttgggcttaaatagtctcctctttttcaaccacatcgtggctcctgaatcctacttactgacaactatgctatcagaggcctctctacttgttttctatatcattttcatccatagaaaacaactcatccacttaggacatatctttagctatactgttcgatactcgctcttttcactttcctttgtaggaatttatttcctgattaatttcttgtatcctgtggatatggtcattaatttgccatttttgattaatactggtttgattgtattgctatcagccatctcttatattggtctacttgccttcaccaaagatagcattttctatgaatttttaaaccatgtcctagccttaaaaaataaattcaaaagatcataggagtttaaaatgaaacaactaaccattgaagatgccaaacagattgaattagaaattttggattatattgatactctctgtaaaaagcacaatatcaactatattattaactacggtactctgattggggcagttcgacatcagggctttattccttgggacgacgatattgatctgtccatgcctcgagaagattaccaacgatttattaacatttttcaaaaggaagaaagtaaatacaaacttttatccttagaaacagataaaaattactttaacaactttatcaaaataaccgacagtacgactaaaattattgatactcggaatacaaaaacctatgagtctggtgtttttatcgatattttccctatggatcgctttgatgatcctaatgtcattgatacttgttataaactggaaagcttcaaacttctgtctttcagtaaacacaaaaatattgtctataaggatagccttttaaaagattggatacgaacagccttttggttgctccttcgacctgtttctcctcgttattttgcacataaaatcgaaaaagaaattcaaaaatatagtcgtgataatgggcagtatatggcttttatcccttctaaatttaaggagaaggaagtcttcccaagtggtaccttcgataaaacaattgatttaccctttgaaaatttaagccttccagcacctgaaaaatttgatactattttgacacaattttatggagattatatgaccctaccaccagaagaaaaacgcttctacagtcatgaatttcacgcttataaattggaggattaggatgcagtatttagaaaaagaagaaattaaagaaattcaactagctctgctagactatattgatgagacttgtaagaaacatgatattccttattttctaagttatggaaccatgcttggagctatccgccacaaaggtatgattccctgggacgatgatatcgatatttccctttatcgtgaagattatgagcgcttattgaaaattattgaggaagaagaccatccacgttataaggttctatcctacgacacttcttcttggtacttccataatttcgcatcgattttggatacttctactgttatcgaagaccatgttaagtacaagcgtcatgacaccagtctcttcatagatgtcttcccaattgatcgctttacagacttgagcattgtcgacaagagttataagtatgtagcccttcgtcaactagcttatatcaaaaaatcacgcgctgttcacggtgatagcaaattaaaagattttctcagattatgtagctggtacgctctcagatttgtcaatcctcgttacttttacaagaaaattgatcagctagtcaaaaatgccacaactaacactcctcaatatgaaggaggaattgggattggtaaggaaggaatgaaagaagtctttccaattgatacctttaaagaactgattttaacagagtttgaaggtcgtatgctgcccgtccctaaaaaatatgatcaatttttaacccagatgtatggggattatatgacaccaccatcaaaagaaatgcaagagtggtatagccacagtattaaagcttatcgcaaaaactgattaagcagtagtttacaagaaaaaatataacaaaaaagagaagatcgttataccttctcttttttctatttaaatcgcttctgtgacaaaactacggctttccaatactttgagcatggcgttagctgtatctagggctgtgaagaggggcactccgtgttcaatagctgaacggcgaatttgctctccatcttcgtcagcagttcgttttgttccaactgtattaatgatagcttgaattcttcctttgcgaacaaaacttggaatatccttatcgtcatcaccaatcttaccaacaggttgggcttgcaatccatgactggcaaagaaggctgctgttccttctgtcgcgaggattccatagccaatattttggaaacgacgagccaagtccaaggcttcttctttggcatcatcagcgatggtaaatacaacgttaccaaaagttggcaagtgtaagtaagaagcttcaaaagccttatagagagctttttccaaagtcgtatcagaacccataacttcccctgttgacttcatttcaggaccaagtaagctgtctaccttagctagtttggtaaaggagaagacaggtgccttgatatgaacgcgggtactttcagggtaaagtccatcttggtagccaagttcttcaagtttttgaccaagaatgagcttggttgctacttgagccatagggatattggttactttagaaagaaatggaaccgtacggctggcacgtggattgacctcaataacgtagactttttcatccttgatgacaaactggatgttcatcattccaaggcagttaagaccgattgctaggcgtttagtatagtctgcgattgtttcttgcaccttttgcgacaaggtttgtggtgggtaaacggccattgagtcacctgagtggacaccagcacgttcaatatgctccatgatacctgggatgaggacattttgtccgtctgaaatggcatcgacttcacactcttgtccgacgatataagagtcaacaagaactgggtggtctggactagccttaaccgcagtacgcatataagagcgaaggtcttcttcgttttcaacgatttccatggcacgtccaccaagtacataagatgggcggacaagaactgggaagccaatcttgcgagctgcaagaactgcttcttcttcattggtagccgtttgtcctggtggctgtggaatatccaaatcttttagagcttgctcgaagaggtcacggtcttccgcacggtctaggtcagctacttgcgtaccaagaatagtcacacctgctttagccaatggctcagctaggttgatagctgtttgaccaccgaactgaacaataacaccttttggttgctccaagtcaatgacgttcataacatcttcaaatgtcaatggctcaaagtaaagcttatctgatacagagaagtctgtagaaacggtctctgggtttgaattcatgatgatggcttcatagccagccgcctgaatagccttaactgaatgaacagttgcgtagtcaaactcgaccccttgaccgatacggattggaccagaacctagaactagaacggattccttatcagacttgatagactcgttttcccaaccataggttgaatagaagtatggtgtttcagagtcaaattctgccgcacaagtatctaccatcttataaactggaacaatcttgttttccaaacgaagctggcgaacttggtcagctgtagtattccagagttcagcaatcttacggtctgaaaatccattcaattttgcagttttcaagacttctagatcttgtggatgggcacctaactcttgctcaatttcaaagatatgtaagagtttatcaagataaaagatatcaatcttggtcaattcagcaatttcttctggtgtgtagccacggcgaatggcttctgagacatagaaaagacgatcgtcttgggctttgactactttttcaatcaagtcatcatctaaaacactggcaagttctggaatctcgttatgatgaacaccgatttcaagtgagcgacaggccttaagaagtgattcttcgatgtttcgaccgattgccatgacttctccagtggccttcatctgtgtcccaagacggcgctcacccttttcaaacttgtcaaatgggaaacgaggaatcttggcaacaacgtagtcaagagctggttcaaacatggcataggttgaacccgtaactgggttgatgacctcatccaaagtcaaaccaactgcaatcttggcagccaatttggcaattgggtaacctgtcgccttagaagcaagggctgaagaacgtgatacacgggggtttacttcgatgacatagtatttgaagctatgcggatcaagggctagctgaacgttacatcccccttcaatcttaagggcgcgaataatgctcaagctcgcatcacgtagcatttggttttcatagtctgacatggtttgcgcaggggcaaatacaatggaatctcctgtgtgaatcccaactgggtcaaagttttccatgttacaaacaaccaaagcattgtcagctgagtcacgcatcacttcgtattcgatttccttgaaacctgcgattgaacgctcaatcaaacattgggtcacaggtgacaatttcaatccattttcagcgatttcacgcaattcttcctcgttggcacacataccaccaccagtaccaccaagtgtaaaggctggacgaacgataactgggtaaccaattgtcgctgcaaaggcaacagcttcttcaacagtgtttacaatttcagattctggaattggttgctccaattcttccatcaattgtttaaagaggtcacggtcctccgcttggtcaatggcagataatttagttcccagaagctcaacaccaagctcatcaaggataccatttttagacaattccatggccatattaagaccagtttgcccaccgagtgttggtagcaaggcatctggacgctccttacgaagaatacgtgtcacaaactcaagtgtaattggttcaatataaaccttatcagcaatttccttatccgtcatgatagttgcagggtttgagttaaccaagacaacctcataaccttcctctttcaaagacaagcaagcctgggtcccagcgtagtcaaactcagcagcctgaccaataataatcggaccagaaccaatcaccataattttttgaatatcagtacgtttaggcatagtttatgatacaaagcccataaagaacacagtgaaaataggaaactcggtgcagacgccttcagcgtcaagacgatgattatctttttcacacagttcttagggcgtgttcacttccgcgaacaatgtatcttctcctttctattcgtcgcctcacagggcgacattaaataagatacaaaggacgaatagaaagcgattgaattttaggaaaccaaggaaggattgacaatcccagttggtttatctaaattccgagctttccgtccgtgttcagttacataaattctccgacgagcttttactcgttcttagtttgattgtttaaaagcttccatcatctctataaactcatcaaataggtagctagcgtcgtgtggaccaggggccgcatctggatggtattggacagagaaagcaggttggtatctgtgacgcacgccttcaactgacttgtcattgatttcttcgtgggtgataatcaagtgttctggcaaatcctcacggctaactgcataaccatggtttttgacttgtaaaatccacacgtcctgtagcaatttcgcgtaccgcatggttgaatccacggtgtccaaatttcatcttgtaggtcttagcaccatttgccattgcaaagagttgatgccccatacaaataccaaagattggaatttttccttgcacaccgcgaatcatgtcaagtgcttggggaacgtcttctgggttacctggcccatttgacaacataactccgtcaggattaagatgaagaatttcttctgccgttgtcgtgtatggaaccacggtcacattacagttgcgcttcgaaagttcacgtaggattgagtgcttgaggccaaagtccactaacaccacgctcaaaccaactcctggagctggataggatgttttagtagaaacctgcttaatattgtctgtcggcaataccgttgcctggagctggtcagtcacatgatccatgctatctccaacatgggtcagagttgcacgcatagtaccatgcttacggataatcttggtaagggcacgcgtatcaatccctgaaataccaggaattttcttggctttcaaaaattcatccaaggtcatttgatttcgccagttgcttgctctacgtgcttcttcgaaaacaacaacccccttacaagtaggaataatggattcatagtcatcacggttaattccgtaatttcctaccaaaggataagtaaaggtcaagatttgtccattataagactggtctgtaatggattcttggtagccagtcatacctgtattaaagacgatttcgcctgttacatcaatatctgctccgaaggccttgccttcaaaaactgtgccatcttctaatactagaagtctttttgtcatattttcacctctcgtggacgctcactggcgtcttttaacgtcttgtgttttagttggcgtttctactcgccagtacggattctaagattgccattcgaacaaagacaccattggtcatttgttggacaatccgtgattttggtgcttcaaccaagtggtctgcgatttccacatcacgattgactggagctggatgcatgaggattgctgtttctttcaaacggtcataacgttcttgagtcaagccatgttgggcatggtagtcttctttggaaaagactgcaccgctatcatggcgttcatgttgcacacggagaaacatcatgacatccacctgatcaatgatttcatcaatagttacaaactgtccatagtttgcaaactcttgacttctccattcctcaggtccagcaaaaaagagttcagctcccaagcgtttcaaaatctgcatattggatttggcaacacgtgaatggtccaagtcacctgcaatcgcaaccttgagaccctcaaagtgaccaaattcctcataaatagtcatcaaatcaagcaagctctgactagggtgttgtcccgaaccatctccaccattgatgatggaagtcgtaatcgtcggacttgcaattaactctctgtagtagtcaacctctgggtgacgaatcacacaaacatccactcctaaagcagacagagtcaaaatggtatcataaagtgtctcacccttattgactgaactagtcttcacatcaaagtcaagtcgctccaatcccagtttaatctctgccacttcaaaggacttatgcgttcgtgtagaatcctcaaagaaaagattggaaacaatcggatggtcctcatagggaagctgagctccatttttaaactcaattcctcgcttgatcaatttcatcacttgatcgacagtgaggtcttccatggacaccacatggtttaatgcttgttgattttctgacatggctactcctttagctttctaagcttcttcagtaatcagaactctatcttggccatcaagttctgccatctctacgatgatttcttcagaacgactagttggtatgttttttccaacgtaatctggacggattggcaattctctatgtccacgatcgactagaactgctaaactcacgcgcgcaggacgaccatgacctacaatattatcaatagcagcacggatggtacgacctgtatagagcacatcatccaccaagataacttcgcggtctgtcacatcgacagaaaccaaagaagtatcttctccactttttacatcatcacggaaaggtttagtatccaattccacaacaggaactgaaagattttctagttgctccaaacgttcttggattcggtgggcgataaagacaccacgagttttaataccagccaagacgattttattcaaatctttgttgcgttcgataatctcataagtaatacgcgtaatcgctcgtttgacagtcaattcgtctacaacttcttttgccttcatgacaaacctccaaaaagaaaagtctccttaaacaaggagacttgaaatgtatagccaagcgagccctactgcaaacagtatagacttcaccctactacttaatcgttctccttgcctgcctcacgggacaggtttaaaggaatatttagttatcaaatactatagcacaaagcatgcttaaaatcaagcaaaaactttcgatgttccatcttacaaattgctaaaatcatataattgtgggtactggtcacactctggatttttaggatgacaaatggctcttccaaaataaatcatagcctgatgagctgctaaccactgctcaggcggcaagatatccataaccctcttttccacctcaagcggtgtagcagatttcttgacaatatcatgatgcttgcagatacgctcaacatgagtgtccactgcaaaggctggaatcccaaagcccacactcatgacaacattggctgtcttgcgaccaacacctgacaaactctccaattcctctcgtgtttgagggacttgaccatcgaaatcgtctagtaactgttgggcacatttttttagaaatttagccttatttcgatacagtcctaggcgagaaatgtgtgaggcaatttcactttctgttgcaacagacatggcttgtggcgttggaaaggcagcaaagagacctggtgtggccttatttaccgctgcatccgttgtctgagctgacaacatgaccgcaaccaagagttcaaaatgattagtgaaatcaagactgggcttggcatctggaaaaagagcaatgatttcttctagcacctttcgtgctcgtttttttgacaagaccattattcgtctccatcaaatagtccttgtaagccagcaaaaggactgttttcttcttttttgactgcttgttgagcttggtattcttcttctgtcatgatttgccagtcatttcctgaaacaaatccttgaccagcttcttcttcagccgtcaagaccttgataggaatgtttagtaggatattgtctgatacgctctcagcaagatcaagttccccattttcgataggcaaaaccaaatcatcgtctaaaacttcctgatctagttggttggttgcgccttccatgaaaacttctgtgactggataagactcagccaactcaactggctccatactgcggctggaagcaagaacaatggtatatgacaactgatagtctaaaaaatacatccggtcttcgtactgtactttcccaactgcaaggatatcttttacatctaaaatttcttgattgcgtgcacgcaggtctgcggctaggtctaacgtttgttcaaaatgcaagccttcagactgcttacgaatttcttgaatatttaatttcatacttcctccataaagatttactctcttgattataccatgaaaaggctacaaatcagcacagcaaactttataattgaaattcaattttttaacatattcactatgacatttttgttttttagtgctatactataggcaataatacatccgagcaaggaggatgttcacatggaagataaataactcattactaatgcaacccaactcttatccgagttaaataaaagtttccaaagctgcaaacagggtactgcagatgatactcgactacaagagctgctaaacactactataaaagagctcaaaaaagcggaaaagttgaacaacagtatcttaattgaccttgagaaattttaccaacgtaccagtcttctgataggcctcggtagcctaaaactgaacgaccaagcacgtaccgcttggcgcaactatgacaagttccattacgatcatgtcaaacacgtactaactctttatggacctgtttttggattctagagattagaattgtcggttttctgttgacaaaatatcctgaaaggtataggatagaggtactaatactcggaggtaagggagacatgaacaactaagtctatcaagtaaagaaactttatttagtagatcttgtttttgtctctttttgtgtgctctttttatactaggtttctagtatcttgtcctcattgaaaataaaaaaactagaaagctatgctcctcttgggttggggtaggcagctccaagctagtttgacgagtttttcaacgaggataatagagtttcgacagtgactttgggctctactagataaagtagagctttttgttatgcactatcgacattctagaaagggcaacaatatgataaaaatcaatcacctgaccatcacgcaaaacaaagatctacgagatcttgtatctgacctaaccatcactatccaagacggggaaaaggttgctattattggtgaagaaggaaatggcaaatcaaccttacttaaaattgtaatgggagaagctttgtatgatttcactataaagggagacgtccagtctgactatcagtcactggcctatattcctcaaaaagtccccgaggagctgaaaaaacaatctctacacgactacttctttttagattctattgatttagactacagtatcctttatcgcttagctgaagagttgcattttgatagtgatcgtttcgcaagcgaccaagagatcgggagcctctccggtggcgaagctttgaaaattcagctcatccatgagttagccaaaccctttgagattttatttttagatgaaccttcaaatgacctagaccttgagacggttgattggctaaaaggtcagattcgaaagattcagcaaaccgttattttcatttcccatgatgaagactttctttctgaaacggctgataccattgtccacttgcgactggtcaagcaccggaaagaagcagaaacgctagtagagcatttagactatgatcgctatagtgagcagagaaaggctaattttgtcagacaaagccagcaagctgctaacgaccaaagagcctacgataaaaccatggaaaaacatcggcgagtcaagcaaaatgtagaaactacgcttcgagctaccaaagacagtactgccggtcgcctattggctaaaaagatgaaaactgtcctctcacaagaaaaacgctacgaaagggcagctcagtccatgacccaaaagccacttgaagaggaagaaatcagacttttcttctcagatatccaaccattaccggcctctaaagtcttaatccaactggaaaaggaaaatttggccattggcggccgagttttggttcaaaaactacaactaactgtccgtggccaagaaaaaatcggtatcatcggccaaaatggtgttggtaaatcaactctgctagccaagttacagcaacttcttaatgataaaaaagagatttcccttggttttatgccacaagattaccagcaaaaactgcaattggagttatccccaatcgcctatctcagcaaaactggggaaaaagaggaactgcagaaaatccaatctcgcttagccagtctcaatttcagttatcaagaaatgcagcatcaaattcgctccttatctggcgggcaacaggggaaacttctgcttttggatttagtcttgcgcaaaccagactttctcctgctagatgaacccacacgaaacttttctccaacttctcaacccgaactcagaaaactctttgccacttatcctggtggtctcatcactgtttcgcatgaccgtcgtttcttaaaagaggtctgttcaagcatctatcgcttaacagaacacggtttagaggtagttaatttagaagatttataaatttgcaacatagcaaaaatccagagacaacctctggattcttttttacatatgttttaaacgttcaatccgttctgagataggtgggtgggtataaaagagtttttggaaccctccccctttcttgggatcattgatataaagtgcactgctggcatcatcgacaggacgactcatcggtttactattatccaacttacatagagcattaatcatcccttgaggattacgagtcaactcgacactggaagcatcagcaaggaattccctctgacgagaaatagctagttgtaccaaggtggcagcaagaggtgccagcacaatagctagtagagaaactacgagcataatgatttctaagccatttccatctcggtcatcatcacttcgtctgcgacctgctccaccccaccacatcatacgaccggccatactagaaagcatggtgatagcactagcaagggcaacagcaatagtcgaaatacggatatcgtaattacgaatatgactgacttcatgtcccataacagcttctagttcttcacgattcatgatagcgaggagacctgacgtcgcagcaaccgctgcgttttgagggttagaacctgtcgcaaaggcatttaaggctggatcatcaatgatgaaaacacgaggcataggaatctgagccaccatagccatatcttccactacatggtagaggtctggtgccgtttgttcatccacctcacgcgctccattcatggacatgacgatctctgtcgattgaaaaatcatggacaaggcatagataaagccgataatcagtgcgataaccaaaccaccaagcccagatcgcataaagaggtagccaaccgcatagccaacaagagctaagagtaggaaaaataccaacaataaaatccaggttcttcgtttattgcttgcaatttgatcaaacaacatcttagtcacctaaaccgctaaaatcaactttaggaactgacttttcctcttctggtgtttgaaggaaatctgctgctttaaatccaaacattccagcgataatattgcttgggaaagtttctaattttacattgtagttgctgacaacactgttgtagagttgacgggagtaagaaattttattttctgtgtttgtcaactcctcttgcaatttaacaaagttggcactagctttcaaatctggatagctttctgcaactgcaaaaatacctgaaacctgacgagtgagggcatcactagctttcatagcttctgctggtgaagtcgctgctgccacttggttacgcagttctgccaccttttcaagggtagaaccttcatatttggcataaccttttacagtctcaatcaagtttggcaagagatcatttcgacgtttcaactgaacatcaatctgactccaagcctcctttgtttgcatacgattcttaaccaaaccgttatagctaacaattacaaaaataacaataagagcgataactccaagaataatccaagtcattatataagtcctttctacttttagattagtaccagtatatcaaatttttaatgattgtggtaaaataagataatactaaagaaggaaataactatgaaaccagaaacattttacaacctgcttgccgagcagaatcttccactttcggaccagcaaaaaaaacaatttgaacgttattttgaactcttggtcgagtggaatgaaaaaatcaatctaacagctattacagacaaggatgaagtttatctcaaacatttttacgattcgattgcacccatccttcaaggtttgattcctaatgaaactatcaaactgcttgatatcggggccggggcaggatttcctagtctaccgatgaaaattctctatcctcagttagatgtaactatcattgattcactcaataagcgtatcaacttcctgcaacttttggctcaagaactggatttggatggtgttcatttctaccatggacgtgccgaagattttgcacaagacaagaacttccgtgctcaatatgattttgtaacagctcgtgcggttgcccgcatgcaggttttatctgaattaactattccctaccttaaagttggcggaaaactattggcactaaaggccagcaatgcgcctgaggaattattagaagctaagaatgctctcaacctcctttttagtaaggtcggagacaatctcagctacgccctaccgaatggagatccgcgttatattacagtggtggaaaagaaaaaagaaacaccaaataaatatccaagaaaggctggcatgcccaacaaacgcccgctttaaattttttagtaaaaaatatttacaaagttcggaatttctgctatactatcacaagcaaaggtttttaatgtcatcccgtgaggtgacgaagacgcagaaatacttgaaactctttaaagtctagattttagagaagtcttactctgagggcctattgctgtaaaataatgggctcttttttgatgcccaaaagtgaggtttatatgaaacaagaatcaactgttgatttgttactagacgttgaccaacgtccttcggcgggaaaaggaattctccttagcttccaacacgttttcgccatgtttggtgcgaccatcttggtacccttgattttgggaatgcctgtatctgttgccctttttgcttcaggtgttggaacactcatctacatgatcgcaactggttttagagttccagtttatctaggatcatcattcgcctttatcacagctatgtccctagctatgaaggaactaggaggggatgtatcagctgcacaaacaggggttatccttacaggttttatctatgtccttgtggctgcaagtgttcgttttgcgggtacaaaatggattgataaactcttgccaccaatcatcatcggacctatgatcatcgttatcggtcttggacttgcaggttcagctgttactaacgctggtcttgtagctgatggaaattggaaaaatgctcttgtagcagttgttactttcttgattgctgcctttatcaatacaaaaggaaaaggcttcctacgaatcattccattcctctttgccattattggtggttacctcttcgcactaacccttggcttggttgactttacaccagttctgaaagctaactggtttgaaatccctggtttctacttgccatttagcacaggtggtgcctttaaagaatacaatctttacttcggtccagaaaccatcgctatcttgccaatcgctatcgtaacaatttctgaacatatcggagaccatactgttttgggtcaaatctgtggacgtcagttcttgaaagaaccaggtcttcaccgtactcttcttggtgacggtatcgcaacttctgtttctgccttccttggtggaccagccaatacaacttatggagaaaatacaggggttatcggtatgactcgtatcgcttctgtatcagttatccgtaacgctgccttcatcgcgattgcccttagcttccttggtaaattcactgccttgatttcaaccattccaaatgctgtacttggtggtatgtcaatccttctctatggggttatcgccagcaacggtttgaaagttttgatcaaagaacgtgttgatttcgctcaaatgcgtaacctaatcatcgcaagtgctatgttggtccttgggcttggaggagctatccttaaacttggtccagttaccctttcaggaactgccctatcagccatgacaggaatcatcttgaacttgatcttgccatacgaaaataaagactaatactcttcgaaaatcaaattcaaaccacgtcaacgtcgccttgccgtactcaagtacagcctgcggctagtttcctagtttgttctttgattttcattgagtatgagagtctaaatacatcaaaaaacgagcatttccaattacggaagtgctcatttttcttctttctaaaaaaggaaagccctgcggccttcctttgtcttacttgcgtttcttcttcgctttcttcattttattagccatgcgtttcatagactgtttcatggcaaattcaccgattttacctttgagtccaccaccaaacatctggctcatatctggcattcctgctcctccgagagctgataagtcaggcataccaccttgtcccatcattccttcaagggcagacatgtccatccctcccatatttggcatatttttaggaaggttgtttggattgatccccatttgcttcatcatcttattcatatctccagacataacaccctgcatgagttgtttagcctggttaaaatctttaatgaatttattgacttcgacaaatgtatttccagaaccagctgcgatacgacgtcgacggcttggatttaacaaatctggattttcacgttcttcaggtgtcatggaagacacaatggcacgtttgcgcgcaatctggcgttcatctaccttcatgttttgaagtgctggattgttggccatacctggaatcatcttgagcaagtcttccatcggccccatattttgcacctgatccaactgatcgatgaaatcattgaaatcaaaggtattctcacgcattttctcagccatttcaagggctttttgctcatcgtattcttgagaagctttctcaatcaaagtgagcatatcccccataccaaggatacggctagacatgcggtctgggtggaaggtttcaatgtccgtaatcttttcacctgtaccagtgaacttgattggttttccagtaatgtgacgaacagatagagcagcaccaccacgagtatcgccatcaatcttggtaaggataaccccagttacttctaactgagtattaaactcacgcgcaacattggccgcttcttgaccaatcatggcatcaacgacgagcagaatttcgtttggttgagccaatgctttcacgtcacgaagttcattcatcaaaagctcatcaatctgcaaacgacctgcagtatcaatcaagacatagtcgttatgattggcttgagcttgttccaaaccttgacgaacaatatcaacagctggtacttctgttccaagtgcaaagacaggcacatcaatttgttgacccagagttttcaactggtcgatagccgcaggacggtaaatatccgccgcaatcatcaaaggacgagcattttcttccttcttgagtttgttggccaatttaccagcaaaggttgttttaccagccccctgcaaaccaaccatcatgatgattgtaggaatcttaggtgacttgataatttctgccgtatcagaacctaaaacggctgtcagttcctcatctacaattttaataatctgttgcgcaggattaagggtatcaatgacctcatgcccgactgcacgctcacgaactttcttgataaagtcctttacaacaggcaaggcaacgtcggcctcaagcaaggccaagcgaatttctttggttgcctcttggacatcagattcagagatttttccttttttacgtagatttttaaagacgttctgcaaacgttctgttaaactttcaaatgccatttttcttcctcttattctctattatcaatacttgttaaaatttctatctgctcctgcagaaagtcatccttgggatagcgctccaaaatctggtcaaaaatttgactgcggacaatgtagtccgagtacatgtgcaatttcatctcataatcttccagaatcttttctgtccgcttgatattatcatagacagcctgacgactgacgccgaactcttcagcaatctcagcaaggctgtaatcatcagcgtagtagagctcgatataattcatttgcttatctgtcaaaagcgccgcataaaattcaaagagcgcattcatacgattggttttttcaatttccataacttttattataccaaaaattagcctaatctaccacattagcaggctaatccgagaagatagctagcaaaatttgaaaaagacaagagactatccccaagtaatttccaattgatagctggcaaaaggatgtccctcttgattttgtagttgataagctagctcaatcttttgcccatcaacttgataatggttcgtttggatgataaactcctgcatgcccataggtgtaggaatataggctaaactatcgctatcctttagaaagcgcataatggtcttgggattggaaaatcgactcatcaccagttcttgaccatgaaatttaataaccactttttccttttcctcattatagaaaagcaggtagctataatctcctttttcatgcacttccacgtcataaagttggtcaatcacttccaactgctcatcaaactgaatcgtatttcgcatccgaatcttcacatcaagtcctctttcttgtctcttgtcctactattttaccaaaaactctagctttttgctataatggtcatatgaacgaaaaagtattccgtgacccaattcacaactacatccatgttaataatcaaatcatctatgacttgatcaatacaaaagaatttcagcgtttacgccggattaaacaactggggacttccagttataccttccacggtggagaacacagccgcttctcccactgtctaggagtctatgaaattgcacgacgtatcacagagatttttgaagaaaaatatcctgaggaatggaatcctgccgagtccctcttgaccatgaccgctgctcttttacacgaccttgggcatggtgcctactcccatacttttgaacatctctttgatacagaccatgaagccattactcaggagattatccaaagtcctgaaacggagattcaccaagtcctgctacaagtggcacctgatttcccagaaaaggtagccagtgtcattaaccatacctattctaacaagcaggtcgtgcaactcatttccagtcaaatagatgcagaccgcatggactatctcttgcgcgactcctattttactggggcatcttatggggaatttgacctgactcgcattctccgagtcattcgtcctatcgaaaatggcatcgcctttcagcgcaatggcatgcatgccatcgaggactatgtcctcagtcgttaccaaatgtatatgcaggtttatttccaccctgcaactcgggctatggaagttctcctacagaatcttctcaagcgggctaaggaactttatccagaagacaaggacttctttgcccgaacttctccacatctcctgccattctttgaaaaaaatgtgaccttgtctgattatctggctctggatgatggtgtgatgaatacctacttccagctctggatgaccagtcctgataagattcttgcagacctgtcgcaacgctttgtcaaccgcaaggtctttaaatccattaccttttcacaagaagatcaaaaccagctcgccagcatgagaaaattggttgaggacatcggctttgatcctgactactatactgccattcataagaacttcgacctcccttatgatatctatcgtcccgaatctgaaaatccacgtacacagattgaaattttacaaaaaaatggagaactggccgaactctctagcctgtctcctatcgtccaatcccttgctggcagtcgccacggagataatcgtttttatttcccgaaagaaatgttggaccaaaacagtatctttgctagcattacccagcaatttttacacttgattgaaaacgatcattttaccccaaataaaaactagaagaggaaatttatgagtattaaactaatcgctgtcgatatcgacggaaccctagtcaatagccaaaaggaaatcactcctgaagtcttttctgccatccaagatgccaaagaagctggtgtcaaagtcgtcattgcaactggccgccctatcgcaggtgttgccaaacttctggacgacttgcagttgagagacgagggtgactatgtggtgaccttcaatggtgcccttgtccaagaaactgctacagggcatgagattatcagcgaatccttgacttatgaggattatcttgatatggaatttctcagtcgtaagctcggtgtccacatgcacgccattaccaaggacggcatctacacagccaatcgcaatatcggaaaatacactgtgcacgaatcaaccctcgtcagcatgcctatcttctaccgcacccctgaagaaatggccgataaagaaatcgtcaagtgtatgttcatcgatgaaccagaaatcctcgatactgctatcgaaaagataccagccgaattttacgagcgctactctatcaacaaatctgctcctttctacctcgaactccttaaaaagaatgtggacaaaggttcagccatcactcacctagctgaaaaactcggattgaccaaagatgaaaccatggctatcggtgacgaagaaaacgaccgtgccatgctggaagtcgttggcaaccctgtagtcatggaaaacggaaatccagaaatcaaaaaaatcgccaaatacatcaccaaaacaaatgacgaatctggcgttgcccatgccatccgtacatgggtactgtaaaaggaaagaatagataaaaaccgctcagctgagcggtttttagtataaatatatcacaataagagtaaatcaataaattgaatggctgttgcacagtcacttaaatcttgatagtacaaaaacaaaatgaacagctgttatatcaaatggagactttataactctggtaattctaccttcaagctcatatccgtcggttgcaataccttctgaaccgcagcaagaaaggctagtccattatccgatggaaaatattggaaagtgatatgaatgacttttttgtcaaagttatcgccatatcgctctacatattgcttgctttcgaggaagtagatgtagttgttgattttttcttgcagaatttcaagatggactgcttctatttcttcctcccagccaattggatccacaaggagtaactctaaatgactatctacaacaccaatagagtctagttcgctaggtttcagttttgaaacgataacttgtgtaacgatttgattaaattcttcaggagaaaatattttttggttatcagataaatcattaaaaattagatcaggattatttcgtataaaaattttgtctgactcttcttgtgtatattgcttttttgatttccaaaaaccatattgcgcataattcattaactctttaccagtatgttctcccgacatatagctatcggcagcttctttggggatttctctaatcacttctgggcaggtaatattaaaagttggataacgcaagaaatacttgtcaccatcttgacagatttccaatatatctttttgactagtataaatcgacttcatttttaatagctattagctccttgtgtttttttaaatattttttcccataccattcctctacagtcttaccttcccactcacgatactcttcaggatatttccatttgtagaatgcttgtaaataactaggaaattcgatgtaaattagcatagcaatcacagcaatatttaggataatccatgttatcaaaagacctaatccttccaatgaagttgaaaattttatggaaaaactttttataataaagtttataattactccaattcccaaaaaactcattccataaatcgctatcttattggcaattttgttgcgaagagaagagccacttccattaccatacatcagttttttaagattttcaatttcaaggctaaacataaaataggctaatatagtaataaaaacaaaaatagcagcaaccatccaaatagataaagttggtaatgacatatcaatcgctaacagattaaattcaagactaagccaaattagaaatgtgatgacatgaaaatgattacgataaggaagtataaaagcttttctaaaaactttaccaatcaatatgataaatacccaaattaagaaacagactagatatacctcagctgttagtaatggatgttgatagataggcaatcttaaatctttaggatcagagttgtgcaaggacagcgagaaaacaagaatcataaagtttataatgacaggaccgataagagtgaaaacaatattctgaatatgaagaactagtttagactttccttccctataatatgtttctaatttagagaaaacatttcctttctgatactgtaaaaaaacatcatcttctagattaagactttcttcaaaacttgcgctaaaaatagatcttttcttcatgattttcacccaaatcctattttaataactccttgtgtttttttaaatatttcattccataccactcttctaaagattttccctcccactcgcagtattcttcgggatatttccatttatagtaagcataaaggaaataaggaaactccataaaaataagcattgcaattaaaccaatgtttaacaaaatccaacatatgaagagacctaaaagagttacggaatgtgaaaaattaatagagaaggctttgaaaatataattaacaatcacagctaatcccaatagacctgctccataaatagcaaggtctttagcaattttatcgagtaaggtaggtaacttaacttctccatacattagattttttaaatctttaagttctatccttaacatccaataaattaaggctaaaagaatacaaccaatagcaaaaagccctaaaattgttagaaatggtaatgctaaaccaatagcagcgagatcgaactctataacaaaccaaatcaaaaacgttatgacatgaaaatgagtcctatatggaagaataaaaaatggtttgaaaaatttaccaattagaactaagagaagccatataaataacccgattacataaacatgagccgttaaaaaattatgattagaaattggaaagactaaatcttttgggtcactagtataaagcattgttgaaaaagccaataacaagaaattgatgccaattgggaaaataagtgtcaatataccatataaaacagcgtttttaaaatagtcaaatacattccttggaggtttggacatttttttatcttgttccttcaattgatactgtaaaaaaccatcatctaataaatttaaactctcttcaaaacttgctttaaatagcgacttttttgtcataagtttaatcctcaatcttcttttctactaattctgagtgctttttcaagtatctctttccataccactcttctacagttttcccttcccactcgcggtattcttcggggtatttccatttgtagtagccttctaaaaagaaaggaaattccataaatacaatcatagcgattaaagcaatatttaacagaacccaacatataaagagaccaaaaccagttatggaagatgaaaaattaatagaaaagccttttaatatataattaataatcacggctaagcccaatacacctgctccataaatagcaaggcctttagcaattttatcgagtaaggtaggtgacttaacttccccatacattagatttttcaaacttctaagctccgttcttaacattacataagccaagaatgctagaagtccaaaaaataccaagatcccccatgttgttaatataggtaacgtaattgttatggccagcaaattaaattcaaacataaaccatatcataacggttacaatatgaaagcgataacgataaggaagaataaacgtccgtttaaagaatttacccattaataccaataacaaccaaattaacaagcaaattaaataaagctcgactgttagcaaaggatactgagaaatcgctaatcttaaatctttaggatcagaatcatgtaaggacatcgccaaaacgaatagcatgaaatttacacctatcggaaacaacagactaagaataaaagttttaataccaaaccaaaaagagggtctccctttcttaaagactttcccaagtttattataataatcttttttctgatactgtaaaaaaccatcatctaataaatttaaactctcttcaaaacttgctttaaaaattgatttcttcctcatacttttcacccaaatcctattttaataactccttgtgttttttaaaatatttttttacataccactcttctacagttttcccttcccactcgcggtattcttcagggtatttccatttgtagtaaccttctaaaaagaaaggaaactccataaatacaatcattgccaaaagagcgatatccgagcctatccataccaacaataatcctaataaagttaaatgaggcgaaacaactattccagtattggataaaattatctttaaaattacagcaatccctaatactccggaaccatacaaggcaataaaacgcaccactctatcaactagagtattctcacttacctcaccaaagaaacgattttttaaaattcttctctcagtacgaataaataacaaagcaagaataaataagagaaaatagataccagcgatacctactaatgtgagagtcggtaaagctactgttattcctaataaattaaactctatacctaaccaaattaaatatgttaaaatatgaaatcgatgtctatatggacgtataaatggctctcgaaaaatttttccaactataatcaacccaagccaaataaacgaaccaagcaagaaaatttcaggtgtcaatagttgcggtttataaatgggtaatgtaagatccataggatccgcattgttcaaagaattagcaaaaactgctaaaagaaagtttccaccaaaaacaaagaaaatactaaaaagaatattcttaatcctgaaaccaatacttgggattccattatttaatccctttcctaaatgttcgtaatactctttctttgaatactgaagtggagcatcatctaataaattcaaactctcttcaaaacttgctttaaaaattgatttcttcctcatacttttcacccaaatcctattttaataactccttgtgtttttttaaatatttttttccttaccagaaatctagatcctaatacttaatccgatctcataataaggagagaaatcccaaccaaattagtacatatattttctcctattataccacacctctgttttcatctgaaatggtttccattttaggacaataaaaaaacactgagcattcagtgctttttcgattgaagtactgccccctgccggaatcgaaccagcaactactccttaggagggagttgttatatccattgaactaagggagctagataaaaactctgctgaaaaagcagagttttttagtcgaattaacgacggatttctttgatacgagctgccttaccttgaagagcacgcaagtagtataatttcgcacgacgtactttaccgtaacgaacaacttcgattttttcaacacgtggagtgtggattgggaagatacgctcaacacctacaccgttagagattttacgaactgtgtagttttcagaaatgccagcacctttacgtgcgataacaacaccttcaaaaatctggatacgttcacggttaccttcgacaactttcgcatgtacacgaacagtgtcaccaggacggaatgatgggatatctgtacgaagttgaccttcagtcaagctttggattaatggattcattttattctcctatctttgtcaatcttgaggaaccttcctcagcggataaactgtatttttgtgcgtccattacacacaagatacagtttaccaaatttccacaaaaaagtaaagaaatttatagcagaattcctaaaaaaatcgcaaccaaaccacctaggtaggttaaggctaggtagctataaaataccttcttatcacttaacagtctttggagttcgtcattcaaggtagagaaggttgttaaacctccacaaaaacccgtcgctaaaatagcatagacttccttagactccacatgattgtagaataatccaattaaaaaacaacccaaaagattggctattagcgttccgagtggcaatttagaatcttgattatagcgggaaaagaaatagcgcactaaagctccgaaaccacaagcaattgcaagatagaccattaccatttcttcctccccaaatagtaagccaagagcaggcctccaccgatgctcaaaagcaaatacaggactaaactaagataacgccctgtatcaagcagtttcacagcatcaagcattagactagaaaaggttgtcaaaccaccacaaaaacctgtacccagagctaaaataacacctttactggttcccttatagactaagtagcccttaacaagatacaccaggcagaaaacacctagatagttaacaagaagggtgccccaaggaaaatctggactggctggtaaccaagtagaaactagatagcggacaagtccgcccaacatggcagctagaaaaatccctagcggataaaattgttcttttttcatttgatgttttgatcctgataatcacgcgaacgtttgagtatgtccgaaaaagtcgctacaatagtctcctgatagcgcttatctcctacgcgacttctaaccttttcaaaaataaccgcttctctcttagtatctaaaatcggtttacctgaagctttcttataggcaactacatcctcaaccaaatgcattcgttcttctaacagtttgacaatttgatcgtcaatttgatcaatttctttacgaataatatctaaatccatacaatctcctcctttatttgaattattgtatcaaaaagccaccaaataggctagtaaaatcccaactcacaataagaaaaatgcactgattgattgcatcagcgcacttttatacttatcctacttttgcagccaattcttctgcgaattgttccaagcgttcaatgtcttcttcctcagcagagagatctactttaacacactctgaacctttttctgctcctgtcgctacaaaaacgcgatcaaagtcatcgacagccttacagaattcgtcgtagaaggtgtcacctgaaccaacaactccgtagattttaccattcaagttgagatctgctaggtcttcgtagaagtccatcatctcatctggcaattctccatcaccataagtataggtcgcaacgatagcgatgtctgcttccaagaagtctgaagcgtcaacagttgtacattcatcaacatcaacatccaagcccaagtcacgtaatttgtctgctacaatatctgcaatttcttcggtattaccggtcatactggcaaatacaatttttgctaatgccatatcgtcctcctcaatttatctttctccattatatcacatctttttcattttaaaaataaaaattcttgtgctacaatgaaatgagaaagaattgaggttatttatggacatttgccatcaaattttagaaaaaattaaagaatacgacacgattatcattcatcgtcatatgaaaccagaccctgatgccttgggaagtcaggtgggattgaaagctcttctcaaacatcatttcccagaaaaaaaccatcaaagccgttggttttgatgaaccaactcttacttggatggctgagatggatcttgttgaagatagtgcctatcaaggagcccttgtcatcgtctgtgatacagctaatactgctcgtatcgatgataagcgctatagtcaaggtgattttctcattaagattgaccaccatccaaatgatgatgtatacggtgacctatcttgggtggatactagttcaagtagcgctagcgagatgattaccctatttgcccaaacaacccaactggccttgtcagatcgagctgctgaattgctctttgcaggaattattggtgatacaggtcgcttcctctacccttctaccactgaacggactctccgccttgctgcttatttgagagaacataactttgactttgccgctctcactcgcaaaatggacactatgagttacaaaattgcaaaacttcaaggctacatctacgaccatctggaagtggatgaaaatggtgctgctcgcgttatcctgagtcaggaaatcttaaaacgattcaatgttaccgatgctgaaactgccgctattgtaggagctcctggtcggattgacagcgtcagtctctgggggatttttgtagaacaggctgatggtcactaccgtgttcgcttacgcagtaaaatccatcctatcaatgaaattgccaaggaacatgatggtggaggccaccctctagcaagtggtgctaattcctacagtctagaagaaaacgaaatcatctatcaaaagttaaaaaacttgcttaaaaactgataaaatacttgccaaacttttcagaatctgatagactagtatggtaacaatctatggctcgcaaagagaccatggcagaaaggaaatattgcaaaatgaaaaaagatatccatccagaatatcgcccagttgtcttcatggacacaactactggttaccaattccttagcggttcaacaaaacgctctaacgaaacagttgagttcgaaggcgaaacttacccattgatccgtgtggaaatttcatcagactcacacccattctacactggacgtcaaaagttcactcaagcagatggacgcgtggatcgtttcaacaaaaaatacggtctcaaataatgataaaaagaacagtttcgactgttctttttatcttctttttatgaaccaatcactactactttctatttgtcaaccatcacgctgacactataattgatttcaaacggggttaaaaaatatcgaaaagaagcttgatattgagaatggtcaagatgattgaaactacgtagcctagaattgtgttccacttagcattggtaaattctcccatcactgacttcttagaagtcagataaattaagggaaaaattgagaatggaagagcgattgaaagaaagacctgtgaatagaccaataactgatctaaggtcttttcttgatgcccaaacaagacagcaactatcatcacagggagcaaggcaaaaatccgtgttccgacacgaataacccactgtggtaatttcatatgcaagaaaccttccataacgatctgtccagtcaaagtacctgtaatagtagaattttggcc

SEQ ID NO: 64 - DNA, 88437 bp, Streptococcus mitis NCTC 12261 contig10
tcctagcatgactgcaatcagtttaatttcatcttcccttgcaatgtcaagtctctaaccaaatctcgcgcctggtccatctttttagtcagaataaactgagttaaatcaaaaatattgtcctgcaaggtcttgggaattgcgttaacaatatcctcttcctcgataacagagtcttctttataggactgtaaaaagaggagatttttctggatttcgctaaattggaaaccagacttgatgaggagattttcaaaagaatgattggcaaactgcagaccttgtttctgactccacttttgaaaatactggcgcaattcttgttctttggcttctactgcatcaaagaccttggcatcacgcttcagtaatttaaccaaccgtcttttactatccagctttccttctgcaaagattaacaacttagttattggtgaaggattgtcaaggtattcctcaaacgacttgagctcagcatctgttaaaaagcgtttcttggctgttgtgatatcgacaaaatggtctaatatcacgattttctcatccgcaaagaaaggaaggctgaccaactccagttctacatccttataaaccacttctttcatatcaaagtaggcaaagttgaggtcagcagaatcatagccaatctgtttcaacacttgactcttcatcacttcaaactgaccctggtctgtccctgtaaataggctcagactaggtaaatttgataaagtcaacttctggctttcttcaatagctagcatcttctctcctttcttctgatttttcgatttaatttagtcaatgtagcgcaatttcccacggaaatcttctaagctctcataccctttttccgacatgattgctttcagttcattggtaatacgttcgaaggcaccaacaccttctttgtgaagggtggttcccacctgtaccatactagcaccacagaggatgtgttcaaaagcatctcgaccagtcagaacaccacctgttccaatgatttggatttgaggattgagacgttgataaaaagcatgaacattggctagagcagtcggtttgatgtactccccaccaatcccaccaaaaccattcttaggtcgaataacgacagattcatcttctatataaaggccgttcccaatcgagttaacacagttgacaaacttgagcggatatttattgaaaatagctgccgcttggtcaaagtgaacaatgtcaaaataaggtggtaatttaatcccaagaggtttggtaaagtaggcaaatacttctgccaaaattcggtcagttgtctcaaaatcataggcaatctgaggtttacctggaacatttggacaggaaagatttagctcagtcagaccacgaaactcactctcttggacttttttcaagatagtatgggtttcctctggagacattccaactaaggatagaaagaaggtacgattcggttccttttcttgtaattccagaagatagtttaggtaataatctaagccattatttggcaagcccatagagttgatggaaccaagtggaacatcttgatagcgtggctcaggatttccctgacgaaagtccaaggtcgctgtcttcgtgacaaaggttcctgctgctgagtttttaacgccttctaactctgctatcgtcatacaagccacacctgccgcattcatcaaacaattgtcaaactcaaaaccagcaatttgcgttttcgttgataccatgattctgatcctccagattccttttattgctaatattataccacattttcagattttctctttaagaaaggcatttataagaaaaacgttcgttttttatctatttccaaaaagcctcaaaactaaatgtcaaaactaaattgatagaatttttagaaaatttctgtttttttctttacagtaaaaaaaaattctgctataatgactcacataattaaattagaatttaaggagaacgatatgacatctgctaaagaatatatccaaagcgtgtttgaaactgtaaaagctcgtaacgggcacgaggctgagttcctccaagctgttgaagaatttttcaacactttggaacctgtatttgaaaaacaccctgagtatatcgaagaaaatatcttggcacgtattactgaaccagagcgcgtgatttctttccgtgttccttgggttgaccgtgatggaaaagttcaagtaaaccgcggctaccgtgttcaattcaactcagctgttggaccatacaaaggcggacttcgtttccacccaactgtaaaccaagggattttgaaattcctcggatttgaacaaatctttaaaaacgtcttgactggacttcctatcggtggaggtaaaggtggatcagacttcgatcctaaaggtaaaacagatgctgaagtgatgcgcttctgccaaagcttcatgactgaattgcaaaaatacatcggcccatcacttgacgtacctgctggtgatatcggtgttggtggacgtgagattggttacctttatggtcaatacaagcgtcttaaccaatttgatgctggtgtcttgactggtaaacctcttggatttggtggtagtttgattcgtccagaagcaactggttacggtttggtttactacactgaagaaatgcttaaagctaacggtaacagctttgctggtaagaaagtggtcatttcaggttctggtaacgttgctcaatacgctcttcaaaaagcgactgaacttggtgcaactgttatctctgtatctgactcaaatggttatgtcatcgatgaaaatggtatcgacttcgatcttttagttgatgttaaagaaaaacgtcgcgctcgtttgactgagtatgcagctgagaaagcaactgcaacctaccacgaaggttctgtatggacttatgctggaaactatgacatcgctcttccatgtgcgactcaaaacgaaatcaacggtgaagcagctaaacgtttggttgctcaaggcgttatctgtgtatctgaaggtgccaacatgccaagcgaccttgatgccatcaaagtttacaaagaaaatggtatcttctatggacctgccaaagctgccaacgctggtggtgtagccgtttcagcccttgaaatgagccaaaacagtcttcgtctctcatggactcgtgaagaagttgatggacgtctcaaagacatcatgacaaacatcttcaacacagctaaaacaacttcagaaacatacggtcttgataaagactaccttgcaggagcaaacattgctgcctttgaaaatgtagcaaatgctatgatcgcacaaggtattgtttaagatttatttgctcaatcctcaatcgctttgattggggattttttggttgagttaaacagttagaaaattacttactcgcccccttttttgcccctttttaaacaaaaagaaaaaccactactcctaagaatagcggtttaatcatgtctttaagctactaatgtagtcgctctattatttaagtgttatgaataacttcaatatctttaaagctttttgttagatttataatttcaactatagccatctctactccttagtttacagcaaaaaattatgcttaatttttattgtttttgtaagaaatcagcgaacccaatactattccattcaacaatcctaaagaaataccatattcaactggaaaatctaaaaaaatagcaaacactattccaattatcacccctagtaaggctgctgttgaaattacatattcattttctttcttcattttctgtacacctcatttcctttttgtatataagctgtagtactctccaccaagagccattaagtacttatgatttcctgactcaacaatcttaccacctttcattacaaaaataatattcgcatccttaatcgttgacaatctatgagctacaattatttgagtacagccctgactttttatatactttgttattctttcctcattaatagtgtctaatgtactagttgcttcatctaaaattacaatactaagattatttattaatgcacgtgccagtgctatccattgtctttgaccacctgaaatatttgaacccatctctgagatgatagtattaaatttcatcggcatagctatgatttcatcatagacttgaactgctttacaaacttcctctatcttttgtgaagtaacttcgtgctttaaagttttattatcaagaatacttctgttcaataaaaatgaatcctgtggaactactcctaaattttgacttaatatttttttatctatttgattaatatttacaccatcaaataaaacttttcctgtatcaatcttatataattctgatggtatttttgataacgtactttttcctgaccccggttgaccgactagtgcaattctctgtcctgactcaatagtcaaatttaaattttctattacaggagctgagtctttggaataagagaaagatagatccttaatatctattctacttcaaacgtttctaaactatactccggaaaataatttaaccaataattaaccatactatctttcatcgtgtcctccaaccagtactaggtctttagatgatatctaaagacttaggtgtacacctaaacattttatccaccgacaataataatatccataaccaacaataaaattagggaattttttaaaattttcttcatatttagacttcctttcagtttttatttattgtacaataaataagaatcaattacttttttgttgggaaaacgggaaaattatgaaatcaaaacttggtataacactcagaaaaattcgaaaaggaaagaaaataagtttatcttcaattgctgatagtaatttatctaaatctcaaatctctagatttgaacggggagaatcagaaatatcttgtattcgactaatcaatattttagataaattacatataactttggatgaatttattattcttcatgacaataattctactaaaactggatcattcgctaacttggtgcaatatattcgaaagcactactccacaaaaaattttgatagtattattgaattactatcaaactcttcaagttataacttgggtccttatgaaaagacaatggtaaaatcgattctctatacaacaaataaaaattttctcccctcggatgaggagttattacagctaacagattatctttttaaagttgaaaactggggttactatgaaattatcctattaggtaactgtgtaagaacaattaaatataactcctacttcctactaactatagaaatgttaaaaaattatatctattcaacattaaataagacaaataaacggcttgttacacaattggcaatcaattgcctaattgttagtattgataaagaagaatttcaaaattgtagttttctaatcaaagaaataaaaaaattactaaataatgaattaaactattatgaacaaaccgtcttcttatatacatgtggatactttgaatttaagtgcaatcctgcgaacggaatcgaaaagatgaaacaagcacttcaggtatttgaaattctaggagaacataatataaaagcacagtaccaagagcactatgacaaatatattaatcaatagcataaaggtagttaatctttaaccaccataggattagttcttattattccaaaagtatttctatactaatttttttatcaaaatccttatcattcagtacttttacaaacatttctaaattttttattaagctctcatactcatagagataatgatctagctccttttgaaacgctcttatttcttcgcttacttgttctactgtaattgattctggcaaatttaattttgaaaagtcatatcttgcaagctttcgactgctcacatcatcactcttcaaattgataagcacttccgccatcttatttaagttggcgattttttcattaatttgatttagttttatatctatctctgctatttcttttactaactcgtctttaatgtcttggtatttcttatctgcttcagttaattcaatgaagaggttaatctcagtaatcttttcctgtagactcttaactgtaggtcttctgtatggtattactcgactatcgttggttagctgtcttatcaatgttcgtcctttgacatactgattcttatccgaatgttctttgttatagacaaagtatgaggttgtctcacgtataaagattttatattttgtttgattctcttcttccagaatatctaattgataattgggaatgaaaatgagaccactctgcttaataccaaaagacactttgatataaatgccctcatcaactagcttctctatttggttctctgcaagttccacttcaaattcacgaacggtatctcgtttttccttaaatgtctcaaaggcttcctcaatctcttcagtggatactttatccttatctcgttcttcttggaaagcatggtactgttcctgtaaattctctaatccttctgaagcaatgacttccttatttttaaaataatcttgaaaaaatttgacatcatataatttcttatcacttattttttgatgacccaaacttatcttttgattatcttcttccaggataaaagttacatttttttgttttaagtcaatggttagattcaattcttttgcttttgttattaaatcttctaaagaattgacacggttcaacaaaaattctaaacgactttcaatctcttgcttagcaaaattcattctaaaaaatttttcatcatataaatctcgcttgctgagttggcgtcctcgaattcgttttgtcattgctcgatctgtcatcatgaatcgactatgcttctgactaaaatcaatatgaacatgtaactgcaccgctttttctaaaaaatcatcaaaggaccttgactgctgcatcaaaaaataaagacgttgtttcaattcaaatttatgactagactgcctatatttttgatagtcacggtaagagaaacgcttttcaataatttttgcccccgccattctagaaatacggtctgaaatcatacgtaaatttcgttctaaggcataattccatatcaattttttatctgaattactgtctatggcattgattaagatatggttgtgggtatgatctttgtctgtatgagtcgctacgataaacttaaagcgacctcctgtcaattccatcatggtctcataaccaatgcagttaatttcttcaggtgtcagattatcttcaggagaaaatgattgaatgaggtgatgagcatgaatagtttgttggtgtttttcttgtcggtcgtttctggattcgtacaacttgtcattattggtgaagttgacattgtacatctctaccatttctgcatgactagggaagtccaagtaattgctcatgccaaaatcagataccaatttcaaattgtccgttttatcagggttgagaatatacttaattaaacgcctacgatatttttttccgtgcgtcgcaaagtgtttagtaactaccatgaaactccttcagtcttttcacctccacttgaaattctttgtccacttccttaattaactctccgactcctttactcaattcttgtaattggtcctgagaaatcagatggctttgattaatcgcacgcgcaatttgatttatgttatttccaatccgtctcaattcaaaaactaactggtcataagtatcagtgttaatcgtgacaaatgacatattgggattaagtaaaacttttctggcatagactgagaaattttgacaattgctcttagcaatccgttcattcaattggtgtaattctggatcagttagaaatacttttttgagattagtacgatagcgataaaccattacatcctcctaacccatatatttttcacggaactcacgactgagtggctgcatttgattcacttctgcaatcaattcttgaacgcaagtcaataagattgagacgtgctcttgagtcacttgatgattttctcttgcgataaccagaacttcatacacatctcgactaatctgttcaaacttttgagactgccaaagggagaaccaactttcaaaaattctatcctgataattctttttcaataaattttgacgaagaaattctgagaaactatccactttttgttccctcatcatttcttttatctgtttttcttcttgtctcgtgattctaaattgctttcggattgacttaatttcttgtcccattctgatatcccttcaacattctacttgtctgacagtgtaagtctacctcacattgtcagtacgcttcctaaagacctcacttgcttcttgttcggtctttgcgagctcagatattgtgtccacaatatcccaaaaatcatatcgcctgccatttcaaacctcacggtttaaaaaacaaacgatatgaaaatgtggtggcacgcccccaaacccccaagataaatctaaattaaaaaaagtataacaaatactttttgataaaattatcacagaaaaaagagccctatcggactcttacaaattaaaacaatgtctctgatattcatactgcctaatcccactactatctttgttcatcttgatagaaaaaacaaagtaatgatcacgattgtctaaagatttgcttttgtttaatttaaaataatgtttctgagacatagccatggtgcgtaaaatatcatcagtgataaatgttaatggtatatctaaagcagaatacttgtaaaaatctgactcaaaccttaaataagaatcagaaaaataatctagctgtaatttatcatcatataattctttacgattcatataaatctaccccttctatctgtatatcgagtatatctccccatcttaatcgaagaaaaccagagtctgatttaatggatatagactctctcccaatctctttaacaatacccgatactacttttcttctatttgagagcttacaaacaaaagttgctgggaatacattcgtataaagttgacgaacaaatagaactttctcttccattgataggaaaatggagatgtcttctctatttttttcttcccaaagagaactggaatgttctgacaaaaagaatcccatccacttagccatcccacggtcttgatactctcttgcagacaaaaaaggtaaataagaacgattcatcattttagtccatctaatcctccagctgaatgaccaccaatgagtttacttcttgcgattgttctagaagcttgatccaaggcattccctttcaatagtgaagtaaaaccaaattctgttcgaatagcatcgattgcggactggagcctttcttctttttctattttctcaacatcatcaaataatgaaatcaatccaaatgattcatctactaaacctgaatagctcactgcaacacttctgatagctcctgaagtatatttagtgtgaattaactttaaaacatagtttgtcagtagtgctgtttgattagttggttcaatcttcatttgagtatgaatagatcgtttctgttccactttagaataccctaagtgtatagaaaccacagttgctttcttaccagctcttctcaatctaacagcaacttgttctgccatctcacgaagtatgatctcaatatctctttgtttgacataatctctaggtaaaacttgagagttccctatcccttttgactttggcttataaggtttatgaacattactttcatcaatcccattagcatgaaaccataactctagtcccataatcccaagctcttttttaatcaagtcaggattagccttagccaattctttaatcgaaaagatgcctaaactatgtaatctcttctccatccgattcccaattccccagaaatctgtcattttagggatagaccatactttcttttcaatatcttcataggaccaattggctctcattgtcggagtttttttagcctcattatcaagtgctaacttagctaataagggattggcattagacatacctaccgttgaatagattcctgtttttctccaaatctttttttgaatagcagctgagatgatgtctaacttatcttttcgactaatacttttatcaggcacaaaataatttaatgaactggttaaatctataaatccttcatcaattgagtagggataaatatcttctggtgctgcaaaatcttgaaagattttttgaatctccatattgactgcaatataagtatccattctcggaggaacaatcactgttgattttgcccagtcctctatataacggacatagtctatcgttgtcggcaaaccttgttttctagcattatagtaagagaactttctagtctttacatcaaatggtaaatcataggaacgtccaacatttgatttcccaaataccttcttaaacataggagaggaagcaaggattaacccagcagaattatctgctcgactcataacacaaagtgaagtcttaagtggatgcaggcctctatctacacactccacacttgcgtaaaaagatttcatatcaataaaggcaatatcgcttttaggttcgagactataatcaaaccaagtcatactcaatcctctaaaggcataaagtttccaacaattttccctatgatacgaggattctcatcataaggcgcaaacttatctgaatagttccgattgagtgaaactaaacgtagcccattttcttcacgatacactttcttgatataggtttgaccatcccaatctatggcatagatagctccatcataatcaaatcctgtttgcttaataagggctacagaaccattttcatatgttggttccatcgaattaccaaacacccatgatgcaaagtcataatcaaattgatgattaaagtaaactgtatcgtaattaccatcatcaaaataagctgttcctgtaccagctgataatttttcgtagaccttataagcaaaacgctcaggaatgtctacaaccttctcattctgtttgttcaacaattctgtagcataatgaagtgtcgctttttgattcttttccgttagtttgagataagtttcaactatttcatactctgattcaaaatagcaagggtcgacagttaaaatctggctcaacttacttagattattttgattcggttttgttttacctgattcccaattaaagtatgagactctactgattcccaaactggatgcaagttgtgattgcgataacccttgactttctcttttttcttttaatttagtaggtgaaaacatttgttctcctttttgtaagtttattaactaacaaaagaataccatagcttgttgaaaaaatcaagagtttaataacccccaagttctaattccgagaatacatttgaaataaaaaagaatgctgacaaatcaacattctttttatgttcactttgataaacattataaaatttgtctgtttagctaccaaaaagctaccaatagatttgtaattttaaataaataaattagtagtactatatttaaatacctagttatctaaaagaataaatttactagattagtaaattaaattagactttgtcagtaatgacgttactctccttacttcaatacatttgaaagtaatgggattagttttaagccgattagaacgatgcctccaccatgaatttgtaagaacttttcatattgaaaataaacaaaagtgttgaaatatagctgattttagggaaatacttctaggtgttttcaatgtcaggctttaaaaacgtggcaaaagtagggcaaaaacgaatgactcgtatttggtttgaaaacctataatacctaatgtttatgctattctagatatatagttttgttataaataaatgtcagtgcgagttcaaatcggaggataaaatggaaaaacaaattaatgaaaaaaaaagccttggttcccaaagctttttaatgttataaactcattaaaataatccccagttagatttggaatattttttattctgtgtcatataaaaataaataaaatgaatggctatagctagagctaaaatggttgttatactcactactattataggattagaagcaaagattaaagagagaatcaaggcagccagatagagtgtcgcttggacacagtagtaacttttcgaatagcgaagatagtgtttgttatagggcccatttactaggacagcagcttgaaagaggccaaatccgatataagagaagctggttgcaaagagacgattagcttcaggattctgaagaaaactcatcgaaacggtcatcataagaagtccaatgaaaataggatagtgactgtaaattagaaatagtcccttttgattagatttttcatcaatagcatggtcgaattgaccaaaataaaacaagaacagagaaatcataataatgaaataaagaaccgaataaatcgagaaattctcgattgtaaagaagttagctagctccgtaatcatctctccaaacataataatgacaagaagggagatacgctcgattaaatgggggagatttacctggtaatgcttatctttattaagcaagatacttggcataataaatgttagcagaatactagcaaataagatatagactctaaggtaaataggaagaagagctgctagatagaatcctaaacttcctagacctgttatccatagaaaacctttgatactttcccgattagcatcatcggttgattttctaaaaaattcaaccaaatattgaaaaaataaggtaagggttaatgtaccaatagcccaacagagataatgaaaatattgttgccaatcaggtccaatcatattggctataaagagtaaaattcccattttgataaacatgattactatgttaaataaagagttctttccatagcgattggtataatcggtttgaatcatccaggaatcgatgagaaacaaagtagcaatgaaaaaatcaaggaaagaattccaagtcaaaataccgttatgaagatggtcaattaaagtagttacttttgaaattgcaaaaacaaaaactaagtcataaaaaagttctgaaaattctacacgtttatgtttaataagagttgtcatcttaagacctttctattttagaagtacaatttattataacataaaatggtaatgagagaaaaggagatgcttaaataacttcatgtgacgctaattgtcaaaaccttggagcacatttacctcacgtaccagcttacaggcggagtgtttgatgattgataatgaagaataagattatacaataaaaaaacacctataatatttagaaaaaatatcatctaaatctccttagtcatgaagtctttcgataactttcataagtggacgaatttttaatctagagacaatacaagaggacccgttctgaaaatgaactaaccgattttctttatcaattaaagatatattataaggatttacgataaatgatctatgacattgaaataaacgtggttcctgtttaagaatatctgacaattgtccataaaattcaactatgtctcgttttgaatagagagtcaacttatgagcaattgttgatgtttcaatatacaataaatctttaaaagggacttgaatttgagctttggatcctgtaaatataaaagagtcctcagatactgttattccttgattatcgctaacacttaaaataacattttcaattcgtttgataaataatggttcaggtaattctttatcaatgaaatcaatagctgatactaaatattcaaaagatacaggcataaactcagaatgagatgttacaaaagcaatcactgcttgagaatcaagttttctaatttctcwrsmamskycwaaycyyytttkgymwymwyytttwwttymawwwymarkwaaaawwawtkrwkrwttycyyyyyyykraawkkycyyywaaarsykktkrrgktttycmwwaamcyymaaawkscywwwmyymawyytwwtwwycmmcmaaawttttttkrmmammwtttymawtyywrkyykktkkwaaaaawtwwyytyywrkataaaaawawtcactacttcactcctatatatttttccactgattttttaatattgtaaagtgtcttctagaacaagcgatgtctgatactctatcatccataaacataatcgttcttgtctcatgattaaatcctgctattttatctttattcacaagaaactttctatggcatctaataagttcttctgtactttcctcttcgattttagctagtgaggttgaagcttcaaaattcccttctgctgttacaaaaagaacagcatgagcttttgtagggtgagttgtaacataataaattttagagagtgatacctttacgatagctctatcttgatataaaatgtagtctttcatatttagcctccttctatcagtttaatcttatcagaatgatggaaattaaattataaaaatctcaaatggtttctatactatctcaaatggtaaaaattttcttaatttagacatttcatgataaaatagatactttttagtatctcaataatattaatctttcttcatttgataaactaatttctaatgaaaggaaagctatgaaggcaattcaaattttacactactctttatttggctatattttatctctgtatttaaaatattatttcttaaaaaaacattcaaaaatacaaaaattttacaaggacataagattaactacaaatataaatcttctacttatcagaagttaagtaagacaatataccaaaagcctatgaaatcaacgtttctaggcttttttgtttttttaatgtggttttgtctgattagaagcaattgacgtattttaactgaaatttaaaatttctttcaaatatttccccgtttgagactcttcacaactgataatatctcttggtttgccttcgaataaaatataacccccattctttccgccctcgggtcctaaatcaattatccaatcagcttgagcaataagttctaagcgatgttcaattatcacaaccgtattcccttgattgacgaggcgtcttagtaaactaagcagttgttcaacatccttaccatgcagacctgtgcttggttcgtcgagaacaaagatttgtcctgactcttgtaacttactagctaacttaactcgttgcacttctccacctgacaaggtacttgtgggctgacctaaagtcagataatctaagccaacttccttcatgactgacagagattgacaaatcttatcgttcgaagaaaaaactgttaatgcttcttcgacagttagattcaaaatctcttcaattgtgaaattctgataacgatagctgagcgctttaggattataacggtgacccccgcactcctcacaaacgacctcaactgaatccgcaaaagccatgtcataaacgatttttccagttcccttgcaaattggacaagcaccttttgaattatagctaaaccaactagaggttacattgttggctttggcaaataattttcgaatttcatccattattcctaagtaagttgctggtgtggaacgaatggaggtaccaataggtttttgatcgatgataatggcatctgggtaattttcgataaattcgacaccaatcagagagctcttccctgaacccgcgacacccgttactgcggtcaagattcccttagggatttttgtattaacctgtttaagattatttgcagtagcatctttgatggcaaaatattctgtccaagctagtgggtcttgattcagtctaagtggttgttttaggacacgggttgtgaaggtgtcagctttttgcaactctacaagacttccttgaaaaattagcctaccgccttcccgaccagccaatggtcccaattcaatgacttcatccgctaaagctaacatttgtcggctatgttccacaaccaaaatattgttgtgcttatctcttaaatccaacaagagctgaccgattttctcggcatcatgagggtgcagacctgcagtcggttcatcaaaaacgtagttgacattacttaggctggaaccaatgtgtcgcaccaacttgacccgttgtatctcaccacctgataaggtttctgtcttccgagacaaagataaataaccaatcccaactgtctccatacgcttaatagcatacttgatttgtgcaactaatgattgacctaaaggactatcaacttcttcaagtaaaggcaagagttcactgactgataagttcatatagtcaacaatattatgcccgtttatcttagaagctaaggccttggggtttagtcctgagccttcacaactggcacaaggtacctgaatgacaagagatagcacttcttcttgcaatgattttttcagcttagaaatatcccttttcagatagaggcggtagaaacgcggaattacaccttcatagtcaacacggtccacactccccgtattattagaacgaaattcaaccttgactatttcatcgcttccttctcgcaaaatctgccattcttcctcagaaaaatcagctaactttttatctgcatcaagtaaaggattatttttgtaaagataagcctgccagccactcgaaaattgactaaaattaatagcaccttcattcaatgattttgtggtatcaaaaatcttatcctcaattaactgataaaccttcccaatcccagtacaaataggacacatccctgcaggatgattgaaagaataagccattgagccacccgcactcggttgaccaacccgtgaaaacagcagacgaataagcggagcaatgtccatagccgtcccgactgttgaacgagtattagtccttaaagctttctgattgacaacgatagatgggggtaaatttttaatttcgtctacgtgaggacgctcatagtgaggtagcttgttccgtaaaaagagaggataactatcctgccactgtctactactttctcttgctagcgtatcaaagacaagggaagacttccccgaacctgaaacacctgcaaaaaccactagcttattcttaggaatcgtcacatcaaagtcttttagattgtgctctttagcaccaaaaatttcaatactatctatttccatcaattattctccatattgtcagttaaagttaacagctcagctttagtaaattcattcttcacaagagttagatattttccttgaagttcaacatatttttgcatatcctcttgccccatgccccttattgcttctttttctgcttccactattttagcaacggtcatctctatataagttttgcctttttcagtcaaggacaatttcttactcttacgagaacttggtagtggcgtcacccttacatattggtcagcactcaacttttttaccgaagagtgaatggtttgttttgggaacatcatctgttcaaccaagtcctgctgagtgatatcaccactatttactaataaaaaataacagacccacacgctactctcagatagcccaaaattcttagccatgacacgataaagagatgagaattctttctcttgtactgataattgctttataaaatctgtttccaaaataattccttacatctcttttagtctgatttcggattaaattatatcctaaaaaaatatctatgtcaaatagagaaggaggcagtatcctcctttcaacacttagttcttattattaatcaacttttccagcctttctacagctcctctcatggtgtctttttgctttttacaataactataaataagcgggacggataggctatcatcaaaaatatcattggcgatatctagtcttgtaaagttactatggcattcagaaatgcgtttcatcagggttacccagttattgacattgctttccatgtattcttcatactgacggcacccctgccctctcagttcgataaaaactcccatttttgattcccagtctttattgaagttaacctttatctctgagaaggcataatgcctttggtacttgtttatcccccattcattgagaacaaacttatctttaggaagaatgaggattttctcaatgacatcatctggagctaagcatttaatcgttacggctaagtagtctaacatcactgagttatccatgtctaggctccaataaatttaatatcagttgccactagttttaagcctccccaatttccaccaccattattattagctcgccaactaaggtggacttctggattgacaagttctactacaagtgagttcagctcatccttttcaacggatttagccaacttgtcaagattgtctacaatctccaagcgaatacccttgaggtcatcaagggaatagcccaggtctttcaaggcttggattttgtctgtatcttgtacagagcaagtaattttagctacttcatctgtcgcaatgctttcgccattgacatttttatagactggtgcaactcgcgaagaaaggatggtcactttctttggaatgtcaaattgtgatttatccaatttcaagtcgccaacttttatagtttcgtctgttaagttaaattttgtcagtcttctttttctgagttattaaaattgattagaacttttgaggctgggcaaaatcttaattcctgaagaaaatggagtaaatcttcccacaagaaaacgcataatatcaagcttttttgaactgcaccccaaaagttagacagagaaaatctaacttttggggtatttttattatgaaattaacttatgatgataaagttcagatctatgaacttagaaaacaaggctatagcttagagaagctttcaaataaatttgggataaataattctaatcttaggtatatgattaaattgattgatcgttacggaatagagttcgtcaaaaaaggaaaaaatcgttactattctcctgatttaaaacaagaaatgattcataaagtcttacatgaaggctggactaaagatagagtttctcttgaatacggcctcccaagtcgtacgatacttcttaattggctagcacaatacaagaaaaatgggtatactattgttgagaaaacaagagggagagtacctaaaatgggacgtaagccaaaaaagagacctgaagagaggacagaattagaacgtcttcaagcagaaaatgagtacctgagagcggagaatgccatcctaaaaaagttgagagaactccgattgaaggagaaaaaagagaaagaagaaagacagaaattgttcaagaattaatgactgagttttcgttagatattcttctaaaagccattaaactagctcgttcgacctactactatcacttgaaacaactagacaaaccagataaggaccaagagcttaaagctgaaattcaatccatttttatcgaacacaagggaaattatggttatcgtcggattcatttagaactaagaaatcgtggttatctggtaaatcagaaaagagttcaacgcttgatgaaagtactcaatttacaagctaaagtgcgacagaaacgaaaatattcttctcataaaggagatgttggtaagaaggcagagaatctcattcaacgtcaatttaaaggctctaaaacaatggaaaagtgctacacagatgtgacagaatttgccattccagcaagtactcaaaagctttacttatcaccagttttagatggttttaatagcgaaattatcgcctataatctttcaacttcacctaacttagaacaagtaaaaacgatgttggaacaggccttcacagagaaacactacgaggatacgattctccatagtgaccaaggttggcaataccaacacgactcttatcatcggttcctagagagtaagggaattcaagcatctatgtcgcgcaagggtaacagcccagacaacggtatgatggagtccttctttggcattctgaaatcggagatgttttatggttatgagaagtcatttcagtcgcttaagcaattggaacaagccattgtagactatattgattactacaacaacaaacgaattaaggttaaactaaaaggactcagtcctgtgcaatacagaactaaatcctttcaataattatttgtctaactttttggggtcagtacatttcaacacctgatactatgcgttttttttgattttaaaaacttttcgcccagctcaaacaactaacaaaaattataagtatagtttattttataatttgagatctaacaatcatttcgattcgttaaatctttcaatctttcttctccagatttaagcatctctttctcaacttgattccattctccaaatagtaaatcatgaaggacggttgctgctgaagttttatcttctcctgaatcatatacacaacttctatctcgttgataaatttgaattctttcaaagatagctagttcttccgattgccgtgtattatcaactagatgatttacaatgaaatcatgatgttcttttggagttgcgcgtgcttgatttggattgatagcgtacagttcttcgtatcggataagagtactcagataggacagcttaggctttgtcgcaattaaggctaattgtacctcataccccttatttttcaagagttttgctgttttctttggaacatcaatcgttcgtaaagttccctctatcaaaagattgtatcccaaatgactcaattctcttactaaagactctaccatttttcctgcaaaatctttggtgtattctacactgtctttgccatattcttgctgcagttctaaatagtgtggatgttgagagcgaaaactatcgccatctatgataacaatatttccttgaaattctttctgtttaatacgatgaattgtagtcttaccagcaccactttgtcctccaagtaaaatcgctataggttgcttactggacttttttcctcttgtcagagaacgaagattccgctctaaagcatgtttgaattcactatcagtataatcttggatttccactaggctaccatccgtttttcagatatctctaacatacgttcaattccatccaaatagccgctatatctctctatttcatcaaaagtttcaactagatagatattcgtatgaatcaaatcagaaagatcatcactcattaaaatccaaggattagattcatcatcaatgctaattccctgactatcttgataacgatagagtcgtgataatagattagctcctctttctttcacaatttcaatttttaaagtcaattcataatcttcaacaggattgagcattttatcttctcctacaatatcgacataagatacattaaacttctgacaaatgatatctattagttccgtagagactggactagttccattttcataacgactcaagctattgcgagaaattcctataatttgggcaaattcgggttgtgttaagtcatgtgttttacgtaaggattttatgttctttccaatcatggcaaactcctttatttttataaatccattatagcataaaaaagcaaaacgcaccaaaaatggtgcgttatttcttgtttttctagcctaaactttacttctataaaagccaccttaaagagtaattcctttttcggtggcttttcaaaatactatacattaaaatactcttgtttaatttttgtaagcaaattgttagcaacagaagttacaccaacatgcatccgttcaggatcagaataatctagattacgagcatagacttctgtaacagtctgagcaatacgctcatccaatttataattggaggcttttaatagtgcacaaaataattctgaactatgttaaaggagaacaatattcaactgttctccaaaataattttattaaaaagaaaaaccctgccaaattaatttttggtagggtttttggtaggaaactaaatttatttatcagtttctaaaatgtgttcacgattctaaaaggctgatactatagtattccgaattctaattggtatatgcctcttatttaagagtaactgaagctccagcttcttccaatttagctttgatttcttcagcttctgcagttgcaacgccttctttaacaagtgctggtgcaccgtcaacaagttctttagcttctttaagaccaagacctgtgatttcacgtacaactttaataacgccaacttttttgtcacctgcagatgtcaattcaacgtcgaatgaatctttagcagcaccagcgtcagcagcaccagctgcagcaacagctacaggagcggctgcagttacaccaaattcttcttcgatagcttttacaaggtcgttcaattcaaggattgaagcttctttaatttcagcaataatgttttcaatgttcaatgccattgttatttcctccaaatatgttttaaatttataatagattttcgtagctaagctacgctgcgtagcttaagattaagctgcgtcttctttgttgtctgcaaccgctttgactgcaagagcaacgttgcgcactggcgcttgaagtacagaaaggagcatagaaagaagtccttcgcggtttggaagagttgcaagagcaagaatctcttctttagatgcgacagcgccttcgattgcaccacctttgatttcaagtgcttcagcgtttttagaaaagtcgttcaagattttcgctggtgcgataacatcttcgttagaaaatgctactgcagatggtccaacaaatactgatgcaagatcttcaagaccagctttttcagctgcacgacgcaagattgagtttttaatgactttatactcaacttcgtttccacgaagctcacgacgaagaactgtatcttgctcaactgtcaaaccacgagcgtctacaacgacgatagatgcagcagctttcattttctcagctactacgtcaactagttccgctttcttagcaataattgcttcactcattagtgtgttcacctccgtaattattttgcttgggaaatttttccaaaagaaaaacgcgcccaaacctagacacgaaagtacaatacgcttctttttacatgatacgttttgtcctcggtaggatacttatgagtcgagctcccctactgtcttaggcagttttttcaaaccgtatataagtatagcatagtcaaaaaaagaatgcaagatttttgcaaactttttttaaaattttttcgtgatttttcttttaaagttctactgtcaggacttgaccttgcttaactactggttctccagcaatataaacatcatcaacatcactggatttgactgcatagacaagatgagagagcatatttgcctgaggttggagatggattttcccttgtggttggatgaccagaaaatctgcttgcttgccaacttccagacttcctatctgttcgtccattccaagaaccttagcaccttctatcgttagagctttgagggctgtttcgattggaaactggctggcatccccacttttcattttctgtaagagagctgctgttcgtccttcctcaaacatatcaaggttgttgttggaagcaactgaatctgtcgcaattcccacagccactcccgctttttggagctggataattggagcaattcctgatgccagtttgaggttactgataggattgtgggcaatagccacttgagaggatgccaagcgctcaatttctcgctcgtttaattctaccccgtgagcaaagacagacggatagtctaagtaacccagttcttctagaaaggcgaggggacgtttgccgtatcgtttcaggataatgccagattcctccttagtctccgcaacatgaatatggataggaatattcaactcttttgccatatctaagctttcttccagcaagtctctactgcaactgtagggagagtgtggggctaccataaccttgaaatttggatttttatatcctaaaatttcctcaatgatagctcgtgttctagcaatggtctcagcagttgtctccgcctcagaagaaaaaagggtaggagaaaaataacaacgtatcttggaagatttcactgcctgataaatccgctcaatatccacaccattgggattatacatatcgttaaaggttgttgttcctgactggagcatttctgtcagcgcttctttgaccgccttggtagtcatgtctggagtaaactcagcttctgcaggccaaatataatcattgagccattcatggagattgctatcatctcgaatccctctcaagcctgtcatagcagaatgggtgtggcaattgaccaatccaggcataatccaagctccctgatagtctataatctgctcagcttgttctaaaatcttttgcttctcttgacctacatagacgatttgagaatccttaacggctaagattccatctagatagacatggaaatcttggttacaagtcacgatatttacatgctgatagactttcattctaggctccttttctaaaagacaatttatactctcttcaaacctctgcagattcaccttgccgtagatatatgttactgacttcgtcagtcttatctacaacctcaaaacagtgttttgagcaacctatggctagcttccttgtttgctctttgattttcattgagtattacagtgaataatttttctagctattgtaacaaaaaagtcacccgaaggcaacttttttcgtccataaaatttcaaaagagaaaggattattcagagctaaaagatgcagcttgctgcatttggtaatacttaccctttctagctatgagatcctgatgattcccatactcaacaatgtcgccatccactaagactagaatcatatccgcatcctgaatggttgacaagcggtgggcaatgataaagcttgtacgtcccttcatgagtttggcaaaggcatcctgtaccagcacttctgtccgcgtatcaatggaggacgtcgcctcgtctaagataagaatcttgggaatagctagaaaaactcgggctatggtcaagagctgagcctgaccgacagagagagattctccagcattttccaacttggtatcgtaaccctgcggcaactgttggatgaaaaagtctgcattggctgctttggcagcagcaatcacttgctcccgactggcatcaggatttccaaaggcaatattgtcatgaatggtcccttgcttgagccaggtttcttggagcaccatgccaaactgctgacgtaaagaggcacgactatagtcataaatggatttcccatccagcaagatatctcccgagttaatgggataaaaacgcatgaggagattgataagggttgattttccagcacctgtcggaccaacaatagccaccttgctaccagctggaatatcaatagataaatccttaatcaaaatcttttcaggatggtaaccaaaagagacatgtttaaaggaaatagctcctttaacttggtcactggtcaagacttccttaccagtttcagccagctcagtgctatctaagacagcatagacacgctctgcgcaagcaagagcactttgcaattcggctagaactgaggaaatatcgttaaagggcttagtgtactgttggacataattcaaaaaagtcactaaacgcccgatagtcaaggtagagcctatcattatacgataagctcccactccagctagaagcgcataaatgagcgcatttacaaagcgagtcgaaggattaactgttgaagaataaaagatagctgactgagaataacctgcataattggcattagcctcgtgcagcctttggataaactcttcctgagcattaaaggactggataatggtctgctggctcaacgattcttcaattaattgtgtctgaatccccctcgtctctgtttgcttctggaagagatgataggatctcttggcaataaagcgtgaaattaccatagacagtggcgtcaacagcaagaccaaaagagtcatgaggagatgaatttgaatcatggctagaatgctgactaaaatcatcaagacaccaataaaaaattggttaaatatcatggtcaaaccagctgccaactgctcgatgtctgtggtcacacgactgaccatctctccacttccttgacgatccacaaaagcaatcggtaaccgatgaagcttatgtatgattcgctctcgcaagtctctggtataagagaagattaggcgattataaataagaggatttatccattgtaccagtgtatttcctatgactaccaaaatcatctgtaggaaaatctgccaaaaaactggtgaagagccagtcactaggacttggtcgatgacctgtccgattaagattggtaggtaaatcgacaaaccaacctgagcaatagttcctagaaaggctaggaaaaggaggaagggatggcttgctaaatcttttgccaaacgtttgagcgtctggtttgcagtttgtcgtctcatactagtcctccttaccatgttgggatgcattgatttcgcgataaacttgactggatttcatcaagtcctcgtgattgccgatagctaggagctcacctttttccaagaggagaatctggtctgccatctgaagcgtcgaagtccgttgagaaatcaaaattaagctcgtgtttggtaagttctctcgaatagctttcaagagtttggactcggtaatggtgtcgagagctgaggtcgcatcatctaggatgagaaatgaagcttggcgcaagactgctcgtgcgatagacagcctttgtttttgaccgcccgagaaatttcgccctccttcctcaactagggcatccaagagtccttccttttcactgacaaaatcctttgcttgcgcaatttccaaggcctgccagagttcttggtcagatagttcttgatctaaacctatagtcaagttggaacgaatggttcctttaaagagttcgactttttggggcacataggcaatccaagaccgccactgcttcaaattaagaggactacctccatctcgataaaggtcaatgctccccttgtctgctggataaagtccaaggatgagttgcaccaaacttgatttaccagaacccgttcccccaatgataccaaggatttgcccttgcttcatatcaaaggaaatgtctctcagagaaggctgggccgcatcaggataggtaaaggtcaggtcttgaacttgtaaaacctgatcacttgtagcttgcttttgttctaattctgaatggaggtcttctggagcttcggcaaagacttcctcaattcgcttagctgagatataggactggttgagagaatttatcagcatggctagcttgaccaattccaccaaaatctgtaagagatagttgataagggcaatgagagtaccttgactgagcaatcctccttgaatagaaacatatcccttccagataataataaggagagttccatttacaatcagataggtcagaggtgttaataagctagaccagaaacctgttttttcttgcaatctggcataaacttggttaagggtctgaaaaatctgtaactctcgtctttcttgtccaaaagcccgaataacccgcatcccttgtaattgctggcgcgtttcttgaactagttgatctgttttctttctgagactactgtagagaggattaaccagtttagaaagcactacaataacaatggtcaaaatgacaaccatgaccaagaaccagaaagtcagctcagctgagatgcgataagccataaaaatggcaccaaaaacgataataggcgctcgcaaaaagagacgcaggaattgattgataccagtctgaatctggtaagtgtccgaagtcaagcgagtgatcaagctagaagttgtcaaacggtctctgctgtccttaggtaaagacaaaatatgacgataaagatcgtttgtcaattccttggcaaaacctaccgctgcattagctgagtaaaactgggctattaaggccactacaacaccaattactgcaaagctaaggagcaggccaatctgcatccatagatgaccttgatttctttggggcaaggattggtcaacaatcccagcaatcaccatgggaaccaagagttcaaaaacagcttctagcagcttgaacaagggagccaaaattgattctttgatatagggtttaaagtaagatagtaagtgtttcataaatcccttctattcgttttctagaaatgaagaaagtgggaagcacccaccatctctgatttatttgtttaagtaaggtagtagatagccatatccttcctcttccatctcatccttggatacaaaacgcaaggatgcagaattaatacagtaacgcaggccacctaactcctgaggaccatctgtgaaaacatgacccaagtgagcatttcctgaccgagaacgaacctcgattcgctccattccatgactcatgtccttgtaatagtgaatcaactctttggaaatcggacggctgaaacttggccaaccacaacctgaggcaaacttatccttggcaaaaaagagtggctcacccgttgtaatatctacataaatcccttcttcaaaggtttgggcataggcattggtaaatggagtctctgtagcagcttcttgggtaacacgataggattcttctgataagctttcctttaaaacctcttggctaggcttttcatagtttgctgcatcaatcaatggcttctcagcatcggtcacatcgatatgacagtaacctgaaggattcttcttaagatagtcttggtggtaatcttcagccagaatgtaatgacgtagtttctccacctctactgcaatctttcgcccaagcatgcgctcctgctcctgcaccactgtgtagatagctggcaaatcagcttcatcttggtaataaattccggtccgatattggcgaccacggtcattcccttgttgattgatagataaagggtcgatgacacggaaataataaagcaaaatctctctgagtgacactgctttctcatcgtaaatcacttgaactgtttctgcatggtctgtttccttgagcagctggtaattggtcgtttcgacttgtccattagcatagccaacactggttgctagcactccagaaatgcgtgaaaaatactcctctagaccccaaaaacaaccacctgctagataaatttctgccatctttatttctcctttatcaagtctttaactaatactcttcgaaaatctcttcaaaccacgtcagcttccatctgcaacctcaaaacagtgtttgagtatcctacggatagcttcctagtttgttctttgattttcattgagtataaacttcttttcaaaaaaaggataggaagccctctggtcgagagtttccccatcctatcttctattctttattttgcttcgacacgaacaccttgggtatcaaccttcaagtcatgcagttttcctttgaagggttgcttttccaattctgccttaatcgttggcatcttgtcatgagaagccaagaccataactgtcggcccagcaccagagaggtaggttgcataggcaccattttctttggctacttgcttaatcgtcgcaaattctctcaccaagtcctgacgatagcgctcgtggaagaggtctccctcgattgcttgcccagcagtcgccatgtctcctgccaacaaggccgcaaccgccacattggcgatagaactagctgcaacagcttccttgtaagacaattttttaggcaagacaccacggctgtctcgagtacgcaattcatagttgggaatgtaggctaggaaatcacactctggaaagtctgctacgatagcagaaacttgcccttcaacagagcttgcaataacgagattaccataaatggctggagccacattgtctggatgtccttcaatcttggttgctaactgtaatttttcatgatcagacaagttgagctgacccagttggttggctagttcaatcccagcaacaataaccgagctagaagaacccaaaccacgcgccaagggaacatcactggtcattttcaggcgtctaggtttcaaatctggtacaatttgcaaggcgattttgagcaagagattacgctcgtcatgtggaatccatttgccaatctggtgttcaatcagccactcatcccgttcttcacagacctctatttgaagatacttggttacagctacaccgaccgagtcaaaacctggcccgatattggcactggttgcaggtacaataatcttcatcttattctcctagcaccttgaaggtattcaagaggtcgaattctgaaaccttcttcaattcagctgagacattttcaagctgggctttattaatcttgtgtgtgatgatcacaacacgcgccttatcaccttctttgccatcttggaggatttgcttgaaggaaatatcttgagcgttgaagatttcagccaatttcaagacctgaccttttgagtctggagccaagattgagaagtagtaatttgctttaacgtcttcaggattagccaagaccaagtcacggctatattcgttgaagtctttgccaatggtaccatcattcaagcgacgaacgatacggacaatatccgccacaacacttgttgcagttggtttttgaccagcacctggtccgtagtacatagactcaccaataccgatagattctacaaagacagcattcattactccattcacactggcaagtggatgcgctttaggaaggaaggttggagtcacttctgcagcaattcctgaaggagtttcctcaatagaaccaaccaatttcactacataaccaagctcttgagctacagctacatcttctggtgtgatgttacgaattcccttgtgggctacgtcatcgaaggcaaccttcatgccaaaggcaaattggctcaaaatcaccatcttgtaggctgcatcaatcccatctacgtcatttgtagggtcactttctgcaaatccaagtctttgtgcttctgcaagagcatcatcgtaagaccagccttcttcgaccatcttggtcatcatgaagttggaagttccgttgaccacgccaagcacgcgcgtgattttatcagaagccaaggaatttgctagagtgcgaagaattggaatcccaccagctactgctgcttcgtagtaaagtgctaccttgttagctttagcaatttctagcaattctgcgccatggacagccaaaaggtccttgttagcagtaacaacgtgtttcccagcttccaaggcacgagtgataaaggtcttagcaggttcgatacgccccatcaattccactacgatcgtaatgtcttggtctgacaaaatatcatccacatttgttacaaagttaaagtcattccctgctgcaagcaagcgattcttttcatcttcatccttaaccaataccttagcaacttcaatctctgaatgtgctgattgattgattttttctccattttcctttaggaggaaaggcacgccacttgcaacggtaccaaatcctagtaaagcaattttaactgtcatgtttgtctccttgaaattttctaatatagccattataacagaattttgtgaaaattcctattatagtaattcactatttcagtctagaaaagaaaaaacgaatcatatgattcgctcttcttaaaatctagaaatagctttccagaaaggattatccaatcttttgcagattgagcactgcatcgtgattcagcaagacttggccatactcttgcaagactgaacgactgatatcactatcttccgcaaactcgcgcatacgggccaagagccaagctggatatggacttggatgattttcaatatccactaaaatggtcaaataatagcgctcattcatcttgtagagttcagaagtttccatctcaaaagtcactgtcttggcaaaagccaccaagtcagctaacttagaaaaagaaaggatgtaatagatgtacggctctttcttgctttcaccttcttgttcagcctgctcttgctcttcctccttggcttcaacctgctctagagattgaatcgcttcgatatcatccttggttttgtctgcgatgcttttttccaaggttttgataaattcatctggagacatttgagccaattcttccatatctggtaaatccgataaatcttcaaaatctagattttgatcaatctttgatttggttacaaagacatctaccttatcaggttttggagtcacacggaagctcaacatacctgtatctaggaagctatcaggcatctctaactcatccaagatagcataaaagaactcttctgttttttcttgaggaacgagaaagtcagcaatctccattcctcgatccatcaaatcctctaaagacatcgtgatttttaaagttgtatcactgatttgtttcattttcattgctagtaacctcatactttcagttctatctattatactagatttttacgattttatcaaaagaaggctcctttgtcgatatagattttccatagggtaacttctgtagaagaccctaatactcttcgaaaatctctgcaaacaaatagaaaaagccttcaaaatcggctcttagccaactttgaagacctaatacatcagaaagcttatagtttaaaggttgctacaccgaggatagaacgatttaagtttcgaagaatttgaagactttgttcaaatttcttataacgagtcactccgtattcttcaacaagaaggactgtatctctttctaaaagagatggtacatcttgtaaatctacaaaatgcattcctttcaaagcctcttgattttgttttaatttatccagaatagctttatttgagctaacgatagtcaattcttgtccagcatttttgtatgatagaatatctgctagattagcaattgttgtaatctctgttacaaaatcaatttgatactgagaaaaatcacctgctctattgattgttgggttaaagagataaaccaatacatttcccatcacaaccaaaatcacacaaactactccaataacagctagacgaagaatcagattcttgacgtttaatccaagcgctgtctcaccgtttgcgttcaattctttagagttgatggtttccaatttttcaattttcacgtttgcataggtatttttaaatttatcaaccagtgcatcgatctttttctctaacaagtcgttggcatctttacttggtgtcaaaattttcacactaacccctgcatcgtcaatcatatagtagacagtcaattttttccaccaatagtcacttgtagaatttttcaaggttgtctctgtcgtatccaattcactggcaatttttttcaactcactaggctctacatcattgaaaagataagctccattcaaattcccatcaatcaattttccgtagaaatcactataaccaccaatttgatgattcaaaatcgttttagctgaatcttctggaggtgtgattttatagctgatataagttgaataacttgttgtgtctttgacagtatttttattcttaactgctttaattgtaaatggtacagcaatgagagcaaataaagcgatgagagctagaatatttgcttttcgttttttgtatagatttgcaaacaaatcagctactgaataatgttcaaacatgatttttttctcctttgtttagtagatactggttctcttttgtaagcattttcgctacgaatataatcacaagaacaattccccagaattgcattgtaaataaattgaagaaactttctgaaaagctacttcttggcataaagaatagattattcaaaatgagtagggacaaggcaaataagattgttcttgaacgataggctacttgcaacatggctatgaatagcatacctagcaagagactaagtagaaagactcctatcataccatagtcggtatacaactccataatgtagctacttccgataccatgtcctttcaagtattccttgttcaagacaagataggatagattatgggcataactattactatcaatagctagttccacactattggttgtatgttcaaaggcttttcctccgaaaatggcccctaaacttccccttgcaaaataatcaataacaggaccaaaagtaaaattgcgtaaatctcggtaaggtaggctactgttaaatagaaaacctcgagccaaaacaccaaaactggttccttgtttatagataaagtcaagcaggatatcccagaaacctgtatgggaaacctggacattatcccgtacataattgagtattcccatcgctaacatgagaataggagaacctacaaaaatcgctaacttttctttaaatccaatccattttcccttttctgtttgctcccgcataaagtaataaacaaaagcaaatagaatacttaaaataaagggatttcgtgtcccgattgccaaatgaatggtattggctgcaataaaggagacaagcactgctgttgcctgcaatttctttggcttggttgccaaatacatacacattgcatagaccgtaaatgttgataagatataggtaaaatagggcagtttactttcaaaatttgcatagtaggcatagtaggaagtctgcaagcgatacaggagccgttcaaataagcgaatgaaatagaaaggataggttagaagaaaaactcctagcgatacaaagcgcaaccgcttgatgtaaacctcttttagagaacttcctatcttgggtacttgtattttctttctagctataaaatagcgagctaggagcccccctgtggtcaatcccaatatcgaaaccatgacgactataaaggcaaagcgataggctatgggatgataggtatccaaagcaccatccctaaagtaatcaatggtcggccttgataccagaaatacaaaaatagttaaaaagaaaataaaatggattaagtaatacttgatatcattccaacaagcaattaagctactaaccagtaagaacaataaagtagaaagcaagctaacattgttattattaaacagatacacaattccacttactatcgtcaaggcatagctgactatggtcaaactaaataataatcgttttccatcaatcacttactcacccccgttctaatgtaattttttagatttttcaatattttttagtaataagaatcggtataaggaaatatttatgaatagagccaaaacactaattcttctccccttacggaaaattggattcctagcaatagcaaaggcatggccttttaaaaaacgatgaatctgagaataggcttcaaattgtttatactgatcatctagcaacatcttatccagaataaagaagtgggcataggccaatctgaaaaaagcaacctctttcaagtcaggatagtttttcacaacttcattgtaaaacttttggtagatatcaatataggctaaatccttctctgcatagggtttagtcgtaatactatcccctctatggaaatagtaataatagggtttggtattaacaacgtacttcttggtcaacttgattaaatcaaaatgataataagcatcttcgtaaatcaatccctttggaaaggatagtgcagttgcaatctctctcttgattagcttattgcaaatcgtcccaggtattttttcacctatgaggtattccctcagaaatgtttgagaatcacagacaaaatagtcatcctgattggttgattgtgggctttcatcattagcatagacattcatgacaccacagctcgaaacatccgcatcttcttgaattaattgctcatataaactctgaatcatttctggatggatataatcatctgagtcaataaaaatcagataatccccgtgggcctgcttcattccatcatttcgtgcttgcgacaatccttcattctttttatgaagtactgacaccctgtcatcttgttcagcgattgaatcacacaagtgaccactctcatctgttgcaccatcatcaacaagaataatttccagattttgataggtctgctcctgaatggaagctatcgatttttctaggtactgcgccacattatagactggcacaatgacactaattaatgcagtttccatgctactcctctaatagtttttctacttgttcgatttgtttggcaattgtaaattgttgaatgaattggctagcctcattgacatcaaagtttgaggcagaggtcatgtagttcgtaattgcctgagctgcctcttgattgctctcaatgatttgtccaaatcgtccttcttgtgatagttcctcagcccctccgacatccgtagagacaaaaggaagtcccagactcaaggcttccacatacactccaggaaaaccttcttgtttagacatagacaagagaaccttcatctgagataaatactgataaggatttttttgataaccaaggaaatgtacatagtcttcaagctcatattctttaactcgttttttcagttcctcttccatatctccagccccgataaaatagagatgatagttttttccctcttggtgtaataatcgtatcacttccaccacacggtcagaacccttattttcctcaatccgtccgatagtacagatactttgaggcgcaatctcgatatcgatcttctcttgagatttttctaaaatagtcttaaaatcatatccattgtagactgtctgtaatttcgaagcataatctggatagacttccttgatagaattgctggttttattcgaaattcctacaatggtatccgcagcatccaactggcgtctatgtgactccctttttgagctatccttaagaaattcttcgatacttccatgaatccaagagattttcttgacttcttttcttttagagaacaacagtggaggattcataatagtaaaagaaacttcaacatcatagtcatctttcacaagcaaacgacgggtcagtcttggaaaataaattctcattctccacaaaagagctcgaatccatctggcttggcgataatcctgaaaggattttaaaatgcgtacatgcttgggaacagattcatatcccttatcaaaatgttccatttcaagaatatcaatatcatacttttctggatctagatttgaaacaatggtagatagaatcttctctgcgccacccccgagagaaaaagaccacataaaaaataatatttttttcttagccaccatattctcccttgtattctgtataagacttatccatatcagcgatgacagcatcatgatgtggtacttgcttgtctgctggtggaggtgtcatataatccccaaaagcagtgctgagataagcatcatagccgactggaacgggcatctctgtctcttcaaatggcaagaaaagattatcctcaaaagattcgattaggtacttgtttctcatgtaaccaggacccgagcataattccgtgattccatcgctctcagctagactgtacttggtcatttctttttcagcttttttccaaatacgataacggagagattttggagtcaaccccagtaaaatacggcttccccacttcataagtgcgccatgtttttctggaatagtttgcgcacaaaaaagagaataaatcaaggcccaacgaacctgttttttccgttcagctggattttcaggataataatccaaaggcaacacatccaaggccagaccatgtggcaattctaaatcctgctgataaggtttgatacaggtcgtttccttatcacgaatggtaataaaaagattgcggtcgacaaaatccttgttactcttcgacaagaaataacgttcatctgcataacgaggccataattctgccaatttttcataatccttacggggcataaaaaaatctagatcatcatcccaaggaataaaacccttgtttcgaagggcaccaatagcacctccaccacagagataacaaagcaaatcatgttctttacaaaaggccacaaaatattcagccatctccagacttcgagcctgaatagcttttaaatcagtcatattgttcattattctttctatcgtatcgttccattataccacaaataagggatgaaaatctattgcagactgtaaaaaatcaaagcctgactgctagatacatagccttcaaactttgatttttctatcttatctcattcccatttgagatagcttggtttgatatttattttggtctactaagagtgcctgtcctccatagacatcataggcatcgacccaatcacctagttctggaactgttaatctctcaataccattttgcgctccatctaggaaggataagccattggtcaataagaaactatagggaacattcgtagaggtcataccaaagaccttacctaatgcttctgatccagtaaagagtttagttggatccttgagttgttgcagaacagctgtcaacacttgctgttgtctcttggtacgaccgtaatcaccttcatcatcatcacggaagcgagcataatttagcaaggttgaaccgttcatctgctgtttcccaactttgatagtctgagttggtgactctgtttccgtagcatgtaaatcatctccgactgtagcttcggttaaaggttgaccttctaaggttgagaatttggcatcaatcgttacaccgtcagggaagagagtgtcaatagcagttgcgaaggcctggaaatctaccaaagcgtaatatttaatatccaagtcaaaattgtcttttaggacttttcgaaccatttctgcccctttttgcccctcttgttcccccaactcataggctacatttaacttattatcggactgctttctaccattaatgacttgactgtatccgtctatatagaccaaattgtcacgcataaagctggccagtttgatttttttatctgagccaccaacgtttagaaccataatcgagtccgttctcgtctcagcactgttttggccaatccgtccatccgtccccataatcaaaatattgaccccatccttggtatcttgaccatgaaaaacttctacttgagctgccttagcattggcaggtttggttggatccgcatttgaataaccttttaggaacataaaaatcataccaaaaccaacacaggctagaagagcaagcaatcctgcaaaaatgcgaccccaacgaatcttacgttttttggacttaacctttggatgagaatgagttttctggtatttttttgcacgactacggttaccataggatggaagaggagactgattgactggctccatgaaagactcttccatatcgtgattttcattataaatttctggtgaaacttcactaccactagccatatttaacttaccttgcaagtaagcaaactcctttttctctcgctcattgaggtaatgaatgttcttaaaaagatagtcataacgcaactgctcgtgatggcttaagggattttctttactcatcttctctcctttccatggtctgatattggataaatgggataggcacccagaactttatactggattccaatcgcttctaattctttttgggcaaagtggaccaagtccttatcagcatagtccacatcaataatgaaaaagtattctcccagcgctgtcttgagtggccgactttcaatttttgtcaggtcaattcctctccaagcaaaggtcgacagggccttataaagtgcacctggaaggttgtccggtaaggtcaaggccaaactcattttctcagtttgtgcttgcaagggaatggctgcaccttcagctcccaaaacccagaaacgtgtgaaattagcttccatttcttgaatatcttcagcaatcagttctaagctatattcttcagcagaacttcttggtgcaatggctgcataaggctggtctggatgttcggaaataaaacgggccgcataagctgtactagctgttacctcaatttgggcctctggatattgttcatcgatgaatttctttccttgagccaaagcctgaggatgagaaaaaatcttttcaatcttagtatgacctggaaccaccatcaactgctgatgaataggctgaacgatttctgccactgcttgaatgcgagcctgatgaaaaaggtagtccaaggtttcatgaacactaccctcgatagaattttcaactggcaccacagaatagtccactaatccttgctcataggccttgatgacatctgtaatgttggcaaaagcctgcaattcctcctgaggaaaagctgtctgcacaacgtggtgtgaaaatgatcccttgggacctagataagcaattttcatctcagttcctctataatttcctctgggcttagcttggtcacatccaaaatccgactagccacttcctcataccaagcctgtctttcttggaaaatagctgcaagttcttccttgctattatttagaaaaagcggacgctgattgtccttatcagctgcgatacggtggtagagggtttcaaaatcagttttcaggtagatattatcagaatttgtctttagtaagtcacgatttcgctgagaaataaccactcctccgccagttgacacaactttgtctctttgtagtaactcagctaggatttctgactctacctgacgaaaagattcttctcccttttccgagaaaaattccgcaatagacatgcctaagcgcttctctatcagagcatccatatcgagataagctggatccaagcctcttgcaatagtcgatttgccagctcccataaagcctaataacaccttagccatgaatcaagttctccaaatcatcaaagaagctaggatagctggtattgatggcttctgcacgatcaagctccacttctccttcagcaaccaagagggccgcgatagccgtcatcatgccgatacgatggtctccaaaagtattgactctagcactgttaagggctgattttcctttgataatcattccatctgccgtaggagtaatatctgctcccatactatttaaggcgtctgccacaacctgaatgcggtctgtttccttgaccttgagttcctcagcatccttaataactgttacaccttgagcttgggtcgcaagtagagcgataatgggcaattcatcaatcaagcgtggaatcaaagcgccaccaatctctgttcctttcaagtcagaagactcaacagtcagggttgcagatttagcgactgggtcaatttcagtaacttctaattttccacccatggcgcgaatgacatcaatgatacctgtacgcgtttcgttgatgcccacatttttaagcaccacacgagagtttggaacaatcaaacctgcgaccaaccaaaaggctgcactggaaatatctcctggtacgaccaccttctgtcctgtcaatttttgtggcccttggactgtgattttcttaccgtccacacttaaatgaccaccaaattgttgcaacatatcttcagtatgattacgggtgcattctttttcgataatcactgactccccctgagcttgcaaggccgcaaacatcaaggctgacttcacttgagcagaggcaattggcaattcataatgaataggtcttaggtttttcgtcccttttaaatgaaggggaggcaggtctcgctcagtttgccctgaaatactgacacccatttttttcagtggaatagtcacgcggtccataggacgtttggaaagactatcatctccaaacatttctacttcaaagtctgcaccagcaagaacacctgaaatcaggcgaatcgaggttccagaatttcccatatcaagggcattttgcggagcttttaaaccatccatacctacaccttgaatggtaataacctcatctttatcctcaatctcaacaccaaggtcacgaaagacttgcatggtcgaaagaacgtcttcacctcgcagaatatcataaaccttggtctcaccctcagccaaacttccaaagataatagaacggtgactgatagacttgtcacctggaactcggatactgccatgtaagtggctaatgtttgtttttagtttcatactggacctcatacttgcaatacttttacctattttatcataaaaagccagaaattccttaaaaattcctgactttatgatagttattttcttattttagcaattctgaaactggttcgaaaacaattttttcaatgtcagaaaggtaaattgccaattgttgttgcttggtaaagaattctgacaagaggctattcccttgaatctgcttgccaaagccttccattttcgcttgaaaggaagcgtctggcatttgacctgtctgtgctagtctttgaatttcctcttggaaagcaacatattctgtaaaaattttgcttgcctcagcatctgctgcaatcgcatctttagctgctttgacagccttgtattctggtaattcgcgtagaccgcgactgagttcatttgcactatcgtaaatatttgacatgattttctccttatttaatgacgactgtgtagtcggtattttctgttatgagatgctcagctcgttccaagtcttgagcatttttaaatgaaatttgtagaatcccgtgaatatcttcacggttttcctcattgatgtgaatattgaccaaggaagttccacgtagtagttccaaaatcctcaagatgacatcttcttcatcaggaacatctacataaaggtcataagagctatccacaccgccacgcttatggatttccatagcctgacgttgctcacgcgcttggttgaaaaagttccaaatctgctcttcatctcccttgctaatggcttgtccaacctcatccaaacgttccttaaaatcctcaatccgctctaggatagtctcacgattagacaagagaatagaggtccacatacctggttcgctttccgcaatccgagtcatatctcgaaaaccaccggccgcaaaacgccttgccatctcatgttcttgagcatagactgccgtctgctccatgagactagaggctataatatgagggaaatggctgatctgagaagttacccgatcatgctccttggcatcaatctcgataaaacgggcatgaagacctgaaagcaagtccctcatttcctcaagcgtgtcctgacctgtcagactcgaaggtgtaaagatataataggcattttcaaaaagattgacatccgcagaagcagcccccgtcttatgactaccagccatgggatgggccccgacaaagcgaacaggtttgcaagccaaatattgctccgccgcatccacaatggctgacttggtcgaaccagcatctgatataatcacgccttctttcaagtccaagttagccaattccttaatgaaagcaatagtttgtttgattggcaagctgagaataataatatccgcaagaggagcaaaactggcaaaatcatctgttgcacggtcaatcatgccctctttcaaggcgacatctctcgaagcttgactgcgattataacctacaatttcataatctggatgatcgcgtttgatcccgagtgccatagaggcaccaatcagaccaaggcctgcgatatagactgtttttgccataggaactccttaatagttctttgcatactctcgatgtttggataccgcttcttttaattcctctagattgtctgatgagaatttttcaaggatttcttgtgccagaaccgttgccacaacagcttccatgaccactcctgcagctggaagagcagtcggatcacttctctccacagttgccttgtagggttcatgggtttcgatatccacactcatgagtggtttgtagagagtaggaatgggtttcatcacgccacgaacaacgatgggttgcccattggtcataccaccttcaaagccccctagattgttggtacgacgagtatagccgtcttctttagaccagagaatttcatccataacttggctacctttgcggtaaccagcttcaaatccaaggccaaattccacccctttaaaggcattgatagagacaactgcttgggcaagtctggcatctaattttctgtcccattggacataggaaccaagaccaactggaacacctccaacgactgtctccacaaccccaccgatggtatcaccgtcacgtttgatttggtcaatataatccttgatttcctgttccctttcttggttgacaatagaaacttcagactgggcagctctttccttaatctcagcaactgtcagattctcaggaacatcgatttccttgccaccaaagaccacgacatggttagccatttccatatccagctcagccaagatgcgtttggctactgccccaactgccacccgcatggtggtttcacgagcagatgagcgctccaaggaattacgcaaatcatcaaaacggtacttgatgcccccaaccaagtcggcatgacctggacgtggatgggtgattttccgtttgcttttaaggcggtcttcaatgtcctccgcagacatgatatccagccatttttgatggtccttattgacgacatccatggtaatgggagccccagtagtcctcccatggcgaacacccgaagtaaagataacttggtcgctctcaatcttcatacgaccaccgcggccgtatccaccctgacgacgtttcaaatcctcattgatatcctcagctgtcaaaggaagtccagctggaattccctcaatgatagctgtcagacgggggccgtgtgattctcctgcagttaaatatctcatacactctccttattttaccaagtagtctttcatctcttccagagaaactgggtgaatagtcgctgaaccaagctctggtaccaagaccaatttcaaggtattgccacgtgctttcttatcatgagtcaaagcctgataaagcttgtcaacatcccagttttcataatcaacaggcaagccaaatttctgacacatctctataatagactgggttattccttctggcatgagacctttttcctcagcaaccttggaaatctgtaccatacccatagccacagcttctccatgcatgactttcccataaccagccgttgcttcaatggcatgaccaatagtatggccaaagttgaggtaaaggcgtacaccattgtccagctcatcctcaaccaccatcttgcgcttgacctgacaagaatgttcaatcaagatctctgcatgctccagaatgctctcaacagaaccatccagctccgtcaaaattttccacagttctggatcctcaatcaagccatatttgataacttcacccatcccttcaatcaactctctttttccaagcgtttcaaggacaagtggatcaatcagaaccccatctggctgggcaaatgtccccaccatatttttagcaaatggagtgttgacacctgtctttccgccgatagaagaatccacctgagctgtcaagctggtcggaatctgaacaaaatgaatgccccgcatataggtagaggctacaaaaccagccaggtccccaacgacaccgccaccaagagccacgattccatcgctacgagtcaacccctgcttaactaggaattcatagactttctgaacagtagttaaattctttctttcttccccttctaaaaagtcaaaaactgctacctgaaaaccagcatcttctaggctgagcttgaccttctctgcataaagagaagctacatggttgtctgttacaatgactactttttgaggttgccagagctctcgcaaccattgaccagcctgagccagacagcctttttcaatctgaatatcataaggatggtgaggaatatcgattctgattttcataggagaatctccctttctttattggtatttttctgttaaagactgccaaatctcttccgttggcatttcctttcctgtccacagttgaaaagcttctgcagcttgatagagcaacattcccagaccattgactgctggattgccctgacttctggcccatttcaaaaatggtgtttcaaagggtttgtaaatgatatctgctactaagagagtttctgataggacaatgttttcaggaactggagatgattgaccatccatgcccacactggtcgcattgacaagtaaatccgactcagcaatccttgcttgcagttcagaaacatcttctaaagcatacaagtccactttaaagcctgtctgctcctgtaacttgttcaggtaaggtcttgtttttttcatagaaactgaacgaacaaagacagaaatctgactgacaccatccaaaatagcctgtgccaagattgatttagccgcaccacctgcacccagcagggtcatcttcttacctgaaattgtaaaagaaggcaagctcttaaaaaatcccttgccatctgtattatatccaattaaattgccattctcattgacaaccgtattaaccgcaccaatcaagcgcgcttcatcgctcagctcatccaaataagaaatcacttgctccttatagggcatagaaaggttaattccaaacatctggtagcgacgaatattggccactgtttctgccaagtcacccgcttcaatctcccaagccacgtaagcaccattggtatctgtcgcctcaaaggcactattgtgaataaagggggaaatagaatgcttaataggattagcaacaacggcagctaaacgtgtatagccatcaagcttcatccaaaatctcccgaatttttttcatgttagctaaggaaatctgacctggggcacttgcctcatctagactagcaaaagaccagctagaacccgtcacatccgcagtgatacgagagaccttgcccaccttgcccatagaaatggtcacatattcctgctcaggattgaggattttaaagcctcgtgtatagttcatcaagtctagcacatcctgctccgtgtgagccatcaccgcaaccttaacaagttttggatttaagctcgtcaactctgacaagatttccatcatattttcaggtgtttcttggaaattatggtaactcaaaacgagatttgggaagtccagcatttcctcaaaaacatccttgtagctatagtactcaaaatcaatatagtctggttgatagagttgtgccacttccttgattagatggatatattcttctggagaaaggtcgatttctcccccttcagagcgagttcgcaacgtgaaaactaactcacggccagcgaatttttcaaaaatagctggagccacctgcaaaatcgcttccttaggcagatagtcggcacgccattcaatgatgtcggcatctaggtacctcgtgacatccagagcctggacctcctctaaacttcttggcattactgaaacaattaatttcatttactaaccttcatactaatcaccttgaggtaattactactttcatcttttttattataggcaaaatctgctggaagaccgtatttatttaaaatctggtaacttcttcctgcaaagcctttatcaatttgttctgtaaatttctggcgggatacattggcagcattggtgctggcaataataataccgcccggatttaaaatctcaagactttgggatatcaacttatgataatccttagccacagaaaatgtttgttttttgttccgagcaaagctaggcggatctaggacaatcacatcataggtcaagccttttcgcttggcatacttgaaatactcaaaaacatccataactataaaacgatggtcgtctgtgctgattccattagcctgaaaatgcacttgagacaattctcgtgaacgtttagctaggtcaaccgaagtagtctggcttgctcctcccatggccgcagccactgaaaaggctgctgtgtaggaaaacatattgagcaaggatttacccatagccaatccatccactaaactaccgcgaacttcatgctggtctaggaaaatccctgtcatcaagccatcgttcataaagacttgatacagaacaccattttccaaaacagtgaaaaagtcaggtgcttcttgaccataaacatgggcagattcatagtccaaacccttaaaacggatcttctcatatgctcctaacacctcaggaaaaacctgtctaaaagcttctgagatggtctgacgaatctgataaacataagagttataccaagaaaagacagcatagtcgccataaaggtccactgtcagacctccaaagccatctccctcttggttgaagagacgaaaggcagtagtcaaatcatcttgatagtaggcacttctcttttctttagcttgtctaaacagtgcttcaaagaaagcttgattgaaggtcaccttgtctgtgctgacaaaccagcccaagcctttgttttgctgagaaaggtaggcagtcccaagaaaggttccttcctgactctgcacttctacttcctgatccttgagattgatattctcaagatcgctggcttctagtaaaactagtccctttgaaagctttttttcaacccttttgttgactcttattctattcatagtcactattatagcaaattttgtgacaattctcaaaaaagaaactacccttgcttttttactctagttttaaaaaatggtatactaatactaataaaaacttaggaagtaattgtgtgagaatcaattttaacaaaatccaaaaagccatgggtaccagactgggttttgtcctaacccttttaatcctctattggctcaaaaccttactagcctataccgttgactttaatttagatattcaattgggcaagctgcaagggaattaccttgcctttatcgcttttttcaatccccttcctttgggactcctcctgctggctctagccctctatgctcggtcaaccaagatcttttatggccttagtatagctatttatagccttttgttcatttggctttattccaatatcttttactatcgagaatttagtgactttatcacggccaataccatgaaagtggtcagcaaggtgtctgttggtactgccgaactagagttactacgcttttgggatttcatctattttatggatttcccattgctggcttatcttctctataagaagctcatccagttggataggagacctttcaaattccgctccagtgttgctatcacagctctctcagccctgctcttttctgctaatcttttcttggctgaaatcgaacgtcccgatctcctatcgcgaggattttcgaattattatgttgtccgcgccctcagtttgccagcctttttaggctatagtgccaaccaatcatacagcgcaaacaaagaacgtgctaaggcttctgagactgatcttcaacctattacagattatattcaagaacattctgctaagcccaatccagactattttggcttggccaaaggaaaaaatgtgatttatctccacttggagagcttccagcaatttcttcttgactataaactcaacatagatggaactgagcatgaagtcactcccttccttaattccctctaccattcgcaagcaaccctagccttttcgaatatctttaaccaagtcaaggctggtaaaacctcagatgcggaaaccatgctagagaccggtttgtttggacttgaccaaggttctttcatggtcaattacggtggtaccaatacccagcaggctgctccttttatcctatcaaaaaacggctatcaatcgagtgccgtctttcacggtaatatcgggaccttctggaatcggaatacgacctataaacaatggggctaccaatacttctttgatgcttcctattttaccaagcaagacagtagcaattctttccaatatggtttgaatgataaaatcatgatgaaagattctatccaatatctggagcatttgcagcagcctttttatgccaagtatatcacggtgtccaatcactatccctatgctagcaatctgactggcgatgagcttggtttccccttggccaaaaccaaagacgaaacgatcaacggctacttccaaacagccaactatctggatagtgctatcaaggccttctttgactatctcaaagaaagcggcctctatgaaaaatccatcatcgtcatctacggagaccattatggaatttctaactcccgcaatcctgacctcgctcccttgattggcaagacttctgaaaactggtcgaattacgacaatgccatgttgcaacgagtgccttttatggtagtcatgcctggctataaaaaagggcaaatcattaatacctacggtggacaaatcgatatcttaccgactctcgaacacctccttggtattaagtccaattccttccttcaagttggacaagacctcctgtctccagatcatcaagaaatcattgcctttcgaactgccaattccttcgtcacaccaaaatacaccagttatgacggacgaacctactacactgagagcggtcttgaaatcagcaatcttgatgaacaagctcagactgaactagaaattgttcgtcaagcagctagtcaacagctaaaaatcagcgaccagattcaaactggtgatttgatacgtttctaccaagcagatcatcttggaaaagttgatacagaaagtatttcttacctcaattccttgccaattctgcaaaagattgaacaggaaaaaggaagtcagtcaactagcctctttagccaacgacaaagtaagaccagtgctgaccttttcaaggcaccaagttaccaagaactccatccagagtcggcagaaaccgaatcaaaatcacaataaaaatgctcttccgtcttggaggagcatttctttttataaaatttatcaagtaagcgacaaactacctcatcttttttctatttctgctaatatgcgtgacaggtagtaatgatagctaaatatagcaagaccaagcagaaggataagaactcctactcccaagctgatggcaaagatagtggagagagactgaaccaagaataagctccctattacaagggccattaggattgcactataaaccaaaatcaaaacaattgctactatacgatttgaacggtttaccaagtccgtaatgttactccaattggttgacagattcttcacatccttaaaataatggtgacaagaaaggatgacactggcaagggtccagactacaagaaggtaaatcatcgaaaggatgggcaagcctaaatatagagaaagaccaagtaaagtcagaactggtaaaaaggactggacagcaaatataatccaaaatttcacttttacataacgagcaaagtcaaagggtaaactcttcagaaaatcaacattttccctctccaaggataaggcaattgaatgcaggctggtgatattgttattgacaacagctagaaagagacctataaaaaacaagggtaaccagtatggaggatgaatgtctggaactatctgagaatctcggatgttggaaatcagaccgatcatcatgagataaggaaggaaagcacttgtaaaaagcactgtaatcacgccagtcccctgtcccaaaagggtgaggtggtagcgtaaaaccatacggaaaaagccctttttagtagttgagagcccctccttactgcgacgttcttttatgaccttctcctcactgttaagtaggatcacgtcataaaaatgaggaagaactttctttttggtcaggtaaagcaagaaaacagttagaattatccaagcgagcagacccaggatggcttctgttgaaaaaggctccactgctattttgtaaaagagatgaataggataaagaagaggtggaatgtctctaactctgtcaactataactccagaagtcgactgtagaaagaagacaaatattaaaggtatgagaactcctatcccaatcatcacattcgaaaaaatagactgatactttctgaagaccgtagtctgagccaagaaatgtactgccactaccatcactagagtcacagagacaaataataaggtcaaggacagtagcatcaaaggaaaacccagccaaagagaaggagctagcctaatgtagagggctagaaaataagctaggattggtacaattccagctagagctggcaagaggacagacagtcctttagcaattataatctctgattctttaaaagcatagggcctataagatgccaagtccttactctcataaaagacattgtaaaatgcagtgaaagaagttgaaaaagcaagcactagaaaaatagcaaccatgaaactaaaatgaacaggactttcctcaaaaggaaaacgaaaggctatattactaaaaaagataagtaataaaagactggaaaaaatgtaagaacttaggactctagcggaaacatttactttttttccaggattcttagcttgcttctttcgtaggttagccagattagcttcttgagatgaatagaggatattgatatcaactaattttttaatgaccttgagacgcatctgaaacctcctcttttctaccagcaaggctaagatagatactttctaaagactggtctggattgtcttttctcaagtcctctacgctaccacaatagatcaaatgcccctttttcaaaatggcaatccgatcacagacttgctcagctacctctaggacatgagttgaaaacaagaccgtcttccctttttgtgcatgttccttcatcattttcttcaaatcaaaggcagcctgaggatctaaaccagtcaagggttcgtccaagacccaaatatcaggatcagacaatagtgctccgatgacaaagactttctgacgcattccgtgagaaagagtttcaataacctgatagcgattttcagcaaaatcaaaaacacttaatagcctagctagactagcctccaaatcagagctagtcagatcataggatgaagcaatcaattcccaaaattcattggccgttaagcgtaaaaataagtcaggcgagtctgctacataaccaatctttcgtttgatagccaagcgattttccgataactcctgaccgtctaccaaaatacgaccactacttggtgaaatgatactgactagagactttatggtggtcgattttccagccccattatggccaatcaagcccataatctccccattttcaatctgcaaattgagattgcttaaagcctctttatcaccatacaacttactaacattttgaaattcaatcatgagaaatctcctctctttatctatgtaatttactataattatagcgctttcattttaaaaatcaacattttatataaaatagtcaaaaacttattattcagttttacgcaaacgtttgagctaaccgatactttatgatagaataaagaacaagattgacaagtaagaggaaacatcatgcaaaatcaaacactcatgcaatactttgaatggtatctgccccacgacggccagcactggacgcgtctagctgaagatgctccacacctagctgatctcggcatcagtcatgtctggatgccaccagctttcaaggctaccaatgaaaaagatgtaggttatgggatctatgacttattcgacttaggagagtttaatcaaaaaggcactgtccgcaccaaatatggttttaaagaagactatcttcaagctattcaagccctaaaagcgcagggaattcaacctatggcagatgtggtgctcaatcacaaggctgctgctgatcacatggaagcctttcaggttattgaagtggatcctgtagaccgtacagttgaacttggtgaacccttcaccatcaatggctggactagctttaccttcgatggtcgccaagatacctacaatgacttccactggcactggtaccacttcacaggtacagactacgatgccaaacgccgcaagtctgggatttatctgattcaaggggacaacaagggttgggcaaatgaggaattagtcgataatgaaaacggtaactatgactacctcatgtatgccgacctagactttaaacatcctgaagtcatccaaaatatctatgactgggctgactggttcatggaaacgactggtgtagctggtttccgcttggatgccgttaaacacattgactctttcttcatgagcaattttatccgtgatatgaaggaaaaatacggtgaggatttctatgtttttggtgaattctggaatcctgacaaggaagccaatctagactatcttgaaaaaacggaagaacgattcgaccttgttgatgttcgtctccaccaaaatctctttgaatccagtcaagctggcgcaaactatgaccttcgtggtattttcacagatagcttggttgaactcaaaccttacaagactgtaacctttgtcgacaaccacgatacccaacgtggtcaggctcttgagtctactgttgaagaatggttcaaaccagcagcctatgccctcattctattacgccaagacggccttccatgtgtcttttacggagactactatgggatttcagggcagtatgctcaacaagatttcaaagaagtccttgaccgcctcctaaccatccgaaaagatttggcctatggagaacaaacagactactttgatgacgcaaactgtatcggttgggtacgttcaggtgctgaaaatcaatccccaatcgcagtccttatctcaaatgaccaagaaaacagcaagtcaatgtttgtcggccaagaatgggctaaccaaacctttgtagatttacttggcaaccaccaaggtcaagttacaattgatgaggaaggttatggacaattcccagtctcagctgcttcggtaagtgtctgggcagccaatacaatctaatagttcataataatcaagtcaggtccaaacggatttggcttttttgtagtcaaaaaagacctacccaccaaatggatagatctttatactcaatgaaaatcaaagagcaaactaggaagctagccgcaggctgctaaaaacacagttttaaggttgtagataagactgacgaagtcagttacctatacctacggcaaggtgaagctgacgttgtttgaagagattttcgaagagtattacttggttacaatttacctgctactgcatccaacaattcttggatcttagcttgattgcttcctcctgccatggccatgtctggtttaccaccaccacgtccatcgacgattggtgccaattctttgacaaggtttcctgcatgaaggtcttttgtcttgcttgctacaaggacattgactttgtcaccgatagcggcaactaggacaagaagatcagagtagtctttttgtttccagttatccgcaaaagtacgaagggcaccagcgtcagatacagatacttggctagcaatgtaacggtgaccattgacttccttcacatccttgaagatatcgcctgctgctgcagctgcggctttttctttcaattcagcattttctttttgcaattgacgaagttgttcttgaagtccttctaccttgtgaggtacttctttaagttgaggtgctttcaaggttgctgcgacagctttaagagcgtcttcttgttcacggtaggcttcaaaggcttccttaccagtcactgccaagatacggcgagttcctgatccgataccttcttctttgacaatcttgaagaggccaatttcagaagtgttgccaacgtgggtaccaccacaaagctcgatagagtagtcaccgatagtcacgacacgaacttccttgccgtatttctcaccaaagagggccatagcacccatttctttggcagtgtcaatatccgtttcaactgtcttcacttcaagagcttcccagattttttcgttgacttgctgctcaatcgcacgcaattcttcagcagtcacagcttggaaatgggtaaagtcaaagcgaaggaattcaacttcattaagagatcctgcctgagttgcatggcttccaaggatattgtgaagggcagcgtgaagcaagtgagtcgcagtgtggtttttcatgacacggtgacgacgattggtatcaattgccaaggtatattcttggttcaaggcaagcggtgcaaggacgtcaacagtgtgaagagcttgtccgtttggtgctttttgaacattggtcacagtagccacgaccttacctgactcatccaagatttgtccgtggtcagcgacctgtccacccatttcagcatagaatggcgtttccgcaaagataagagaggcagttccttctgatacagcttctacttctgcattgtcagccacgatagccaccaatttagaagataattggctagcattgtagttgaagacactttctacagtgatgttttgaagggtttcattttgcatacccattgaaccacctttaacagctgacgcacgcgcgcgttcttgctgttctttcatggctgcttcaaatccttcacggtctacagtcatcccagcttcttcagcgatttcttcagtcaattcaactgggaatccataagtgtcataaagtttgaatacatctgaaccagcaatgacagattgacctttttctttcaagtcagctacaatgccttgggcaaagtgttgacctgagtgaagggtacgagcaaatgactcttcctcgctcttaacaattttctcaataaagtcacgtttttcaagcacttctggatagtagctttccatgatttttccaacggttggaacgagtttgtaaaggaaaggctcgttgattcccaatttttgaccatgcatagaagcacgacggagaagacgacgaaggacataaccgcggccttcatttcctggaagagcaccatcaccgatggcaaatgaaagggaacggatgtggtcagcgatgaccttaaagctcatgttgtcgccatcttggtcataaaccttaccagacaatttctccacttcacgaatgattggcatgaagaggtctgtttcaaagttagtcttagcaccttggataacggccaccaaacgctccaaaccagcgcccgtatcaatgttcttgtgtggcaattccttgtactcgctacgaggaacagcagggtctgcgttaaattgtgacaaaacaatgttccagatttcgatataacggtcattttcgatatcttctgcaagaaggcgaataccgatattttctgggtcaaaagcttctccacggtcaaagaaaatttctgtatctggtccagaaggtcccgcaccgatttcccagaagttgtcctcgattggaatcaagtgacttggatccactcccacttcaatccagcggttgtatgaatctttatcatctggatagtaggtcatgtaaagtttttcagcaggaaaatcaaaccattcagggcttgtcaaaagctcataagcccaagtgatggcttcgtcacggaagtaatctccgatagagaagttccccaacatttcaaacatggtatggtgacgtgcagtcttccctacgttttcaatatcattggtacggatagccttttgggcattggtaatacgtggattttcagggataatggttccgtcaaagtatttcttaagggttgctaccccagagttgatccacaaaagtgttgggtcatttacaggaaccaagctcactgatggttctacagagtgacctttggtcgcccagaaatcaagccacatttggcgtacttgtgcactagatagttgtttcatattgtctccttatttacttgtttaatgtgattggctttccagcatttccacatagtcaatcgcgacacagagggaaatgactaggtctgcataagcatcctccagaaccgttacgctataggtagaggtcagatggaagagttccttcttaatttccgcaatcagctgatcgcgatcatccagcaatttgaaattcaaatcccagatattgccctcgatacgaagacctagattatcaaactcatacttatctcgccagaaggtcaacttcttgcgaatgacaaaactcgagccatcccaaagctgaatctcaaaacgaggtagcaaggtcaagatttctttactaatctgactaacctgttcaccagtcgcatcatagatggtaaaagttttgggaatcttaaaaaatgatccctccacctgataggcaatttctcctttgtcatccttgatagcgaagcgttcgcctccaagacgaaacttttgtttgacaagaaatgttttcatcaacacctccaaaaatcaaaagacaagctcatatcacgaagggcgaaaaaccgcggtaccaccttcattcaatgaacttgtcattctcttattcttatgcaattgtatgattgagtagcatgactttctagcttagatggctcgcagcaccgccatttctctggactaagataattgaaaatcaattctcaactttcttattataacgtttttttaagcttgcgtcaactggaaatcatcttaactaatagtagtgaggtaggagggaagaccttttaaaaatttaactactagtttcgaaatgtaagtagtaatatttaatttatttctaaaatctttctatctagcatagccctagaaggctatataaaaccctccagcgctgtttagtatgtcccccctacactgataagattccactcagagtagcttatcttgaacaattttggggattttgtgtcttcgtcatatactacgagatagtgcccttcatcattccaaaacttgcccaatacctcggagtctcttaaatccattttctggtttaagtagtcgctagtatactcaatttttggtgcatcttttaccccagcagtagaaaaactgctaccaataaagataaaagcataaaatagcaccacagcaatccccaagaatttaaagattttatagtttgtattattgttttccatgtttgtatattccttttctttctattttgtgtttccttaaatcccaagagggaattttacccccttatccaactaaatcattaagccaattttttcaatcacttcttggatctcatctagcgatactagaaaccactctttagggacaaagctatctccatttggtgctattaattccatatctaactgcttgtctgcaaaataatgatgaagagtagtttctaattttcgagcgctgaaattttgaacctcaaaactagctactaaacggacaggagcaaaaagataggttccttctctttctgaatttgctaaccgtttttcaatttgatcctgtgtaaaaccgattttatagagattactgatgttggcaatttgaggattgctactcaaagatttcactacatagatatatccagttgtaattcgttcgcttggactgataacagtcatcacatcttctatcaattctgttaccattcgtccatggcgcgttctatcgtgcagattagatacaaaagagcggagtaaggccttcttattttctgtaccattttcatatacgagatgaagttcagcattagtataaccattcttatcagtgaagtcttctcctttagaaacaacataaaccattactccattatccacatagaacataccaggtttaatttctttttcttttatcacatcagactttctgacttgacgacgaccttcactaatttcatcatgaacacgagtaaataatccctgataatcttcaaaatttcccatccgtttacgtgttcgtgttttatcacgcgcttgaatcgttcgtttataacgtgagacatcaaataaagatttttcagcaccatttactgactcaaacaatttatctgataaaatatctgttaaactagcaggacttgaaataggggtctcggactcaactatatctatttttagtagcccaaattcatcataaggttctaactttcggatgctattaggagattttctaataccattcaatcgagaaaataaactgcgttctttaatatttctagacttttgtggctcttgcccattattttctctcacccaatctataatttctaaaaatttctctacttcatgatctgtaactatttttttcttaggttttaaaggagttattaaatgttcaaaatcagaatcattaaaaatgtcatttaagtttttgaaatcagtcattaccgctctccatcttcagcttcatctgagataattgtaacaaagcataagcaagtctctgttcgtacttatcgtgacttgatttatctggatgacgaccattttctttcaaaaattgcttaatttgaggataaagaattaacagttcttcttcagaaaactccatcttctgaccatccatataatcttgtatcagacgtaaagtcggagcatcaatttcacgtgatataacttcgtaagctctctggaagggattaatctgatcaatcaaatcaatagataactcatcaatattcacaaatttatctgccatttttagaaaatctgtttgccctactccctctttccgttcagctgattgaaccaccgattgactaataaactgttgacgaacttcttcaacttcagccccacttaagtcagggtagatttgtttaatgatggctggaatcatctgcttattaatgacttctgcatccgttcctgcagcaattgcagtttggatacgcggttcttgcaatatactagcacgtaagtcattcaaatcattttctatgatatcctttgttctctgtgtactaggctcttttaagcctttaacaaacatttcggcaccagaagatttctggtcttctcggtcttttcgtttgaacttgaaatttggcgctaaaacagactccatcaatagactagctgtaatggccttcataacattattcacagcgaagaaaacttcatcatcttgagcatctggttgagaaatgagattggtaaattgagcgtgtgacttattggaactatcgcgtgttactcgacctataatctgaacaatttctgttagcgactgacgatagccaatcgtcaaagcatactcagcataaggccagtcaaaaccttctttagccataccaagtgcaataatgatatcgagatcatttaaactgctcatcttgtttaggtaatcctgtactttttcacgttcttcttctgtgacaaggtctgcaactttcaatacacgacctgtttcctcagtaactaaccataatccagtcttaggatctggaactgcttgccccagttcgtctaaaattcggtcaacttcatcatacttatccttggttgactcacctgagtttacattgggaatatgaataatggttttcttgctcgtgtccagtacttcgtgcaaagcatccgtataacgaccacgataaaagttatagcccatggcaaaacttttcagatatttgtacccctccaactgttcataataagtataggataccttgtcgaatttttgctcatcttcaggtgccaaaataggtacagaatctccacggaaataagagcccgtcatagctactacatgggctgttgaattggctaatatgtttcttaaggcatttcctaaaactgaattatcatcttgagatacatgatgaaattcatcgatagctaaaagaacatcattaaaatcactatcagccagctgttcaaaagcaaaacgcaaggtggcatgcgtacagattaaaactctatcatcaggagactctgaatgcataaagtctacaaactgttttaccttacttttactggtcccttgttcagtcaaattatttttggaaagaacttcccaatcccagtaaaaaccataatctgtcaattttgttgaacgaaacgattttccgatagatctttctggaacagctataatagcttttttcagaccttgagcatgtaatttatcaagagcaataaacatcaaagctctcgacttaccagatgcaggaggcgccttaatcaataagtgttgagaagttctcttagcatatacccgctcctgcatttcacgcataccaagtgcattattagattgactagcacctgtaccattgtaattaatttcaaatatatttgaggtcatttcgcttccttttctgtcatttctttatacagattcaataagacactgagcctttcttcatctgattcaaaaggcttttgctggtaggcacgttctacgataccatcaattttttcatgtgcttgacgaagacgttcgttcatcggtttattggctccaccgtacaattcagccaaggttccaccttcttcttctcgaacatccagcatttcaaaaacagcttcttcaagcatatttttccgactatctgaaagttctggaattgggaatgtattataaaccagtccagctgaataacgcaaacgtgtctctaattttcctccaatagattctaaccaaaccatatgcattttggattctaagataccaagaagccaaataggagcattgtaaataaccatagcagaatctgatacaattgtgtcatcttcaataaatcccataggtacataagtacgagattctgatgatacacgtggaacaataatggcttgacaaccttctatatctcctttttcatatgcttcgtcgtattcacctcgttgtacaaatttccatggcgtagacgcagtttctcttgttccagcagccttagaattcaggcgttcttgccttacattttcaaataattgatggaattcctggatcttatctaatttagtatattcatcttgatcaatccaaatagtatatctaaaatttccattgatatactcatctgctccaatatactttttaaaatacacttcagtttcaggatatctttgaactaatttatttttatcatcatttgtcaatattagatatttacttcttggcatattcccaaagactatttttggaaaattatttaacttctctgaatcattgtgattagatacaataatatcatctgcgaaagctagatagggatttatattctttccataactttctcccttatcactatatataatttttttcttatcatttttatttgaaaatccaataatcgtaactgtaacccctgcattatgggccgcgctattgttccatttaaaagattgatatgcaaaggaaatttggccatatcgtagaagaacactccacaaaattgaaacttgctcaccttgatttattgaatttgttgttacaaaagcatattgagcatttttaccataaataaggtgagttgccttataaaaccatcccgaaatataatctaattttttagaagaaatttctgaacaaatcacattttctagttccttcttttgttccaaggtcatttttttagagcctatatacggcggattcccaaatatataaacttcgtcatctgccttagcatttaacacaatttcccagtcaattcttagggcattcccacaaacgatatttccagcttctcttaagggtaatagtcttggatggacatcagcaagcgcttcttccatctccacattcatctggtgttccgctatatacaaggatagccttgctacttcatgagcgaaatcatccaattcaattcctgaaaactgggatagagaaatcttagacgcatcagcaatcaattctccttgataaacagctttttcattcaaggcttcacgaatttcacgctgtttgactaagatattgatttctaaacgacgaagttctttataggtaatgatgaggaaatttccagaaccacaggcagggtctaaaaacttgatagaggccatacgagtaagtaaatcttctaacttaggtaagatttgtcgcaattccttgcgacgatgttcatcgctaaagtcaccacctcctatataataatcagctcgttcttctaattccgtaaatgctactcgtaaattatctaaaaatagtggtttgatgaccttcataatattgggcacgctagtatagtgcatacccgatgttgatcttgcttctgcatttgccacagtttggatcattgatcccaaaatatctggattgatttcattccagttgagcaattcccctgcttcaatgagtagttgacgagttcttttattaaaaataaggtcatgatgtggctctgaaaaaagcttaccatttacataaggaaaatctgataaccacgactccaaatcctgacgactaaattcaggcatatctaaaacagtaaatagttttctaacacactcattcaagtcagaaccatcttcggatgtcctcatcttaataacatttgtgaaagctcccttggagatgatatttgtatcttctgcaaatagtagaaaaagaacacgaatcaaaaataaattaaatgatttaccatcagtttcagtgattgctagttcaggattgatagaaattagttcatcataaagtttggtgaaacgctctgccgcttttacatcagcagggttttccttatcataatcaatcttttcaattccattccaaggtaaaaagaaatcacaatgggctggtaaatcattaaaagaaattgctagagttagacctgtctgtgtatcctttgcatataattcttgaaaatctgttgtaataataaatcgagattttcgaacctgcccctccaactctttatcaatctcagtcagagcaagtaatggctgattttcaactttacgaaagtataatttattttttattataaaatcatcagatgccactttacttgctcttgttatggtcgttttagtaatgtcaaataatgaaataaaatcaataataaatgtcgattcattaagattctctactaaaaccttggttctatcctcaatctcagtgatatttaataactttttagccattagatacctccaagaaacgcaaaaagcctactggattttcagtaggtttcaatctatatttttcacatatttttattaggttatatatatatatatatatatatatatatatgcatttgcgtagtctgactcattttgaactcctttagaattaaattttcagagatgctataaacaattctaataactctcagcctaaaactattataccatgatttctattttttcaaaaaaacgaaccagattaactgattcgtttcgtgactgctaatctcctacttccgatacattttaaactgtaggaagaggtcgctgtattttcccgtccatttatggtcaaatttctcataaacttctaggtgtttcatggtttcagcatctggatagaaggccttgtcttcttttttctcctctgggagtagttccttagctggtaggtttggtgttgaatagccgacatactccgcatttttaagagcattttcgggtttcaacataaagttgataaaggcataggctgcgtcttggtttttgactgttttgggaatgaccatattgtcaaaccaaaggttgctggcctcagtcggtactacatagcgtagattttcatttttttctagcatttggctggcttcacctgagaaggtcacaccgatagcagcgttgttctgaatcatatagcccttcatctcatccgccacaatagccttgatatttggagtcaatttatagagcttatccactgtttcttccaactgctgggtatccttggagttgaggctgtagccgagggagttgagccccagtcccaatacctcacgcgccccatcaaagagcatgatagagttcttatactctggtttccagaggtcgtcccaatgctcaggagcctcatctaccatggtttcattgtagacaattcctaaggttccccagaagtaagggatagagaatttattgcctgggtcaaaggactggttgagaaactctggtccgatattttcaagaccttcaagttttgaataatcaagcggtaccaagaggtcttcgtccttcatcttgttaatcatgtattcactaggaatggcaatatcgtaggtcgttccaccctgcttgatcttggtatacatggcttcattggagtcaaaagtctcgtactggacttggattcctgtttcttctgtgaactgagtcaagagttcaggatctatatagtccccccagttgtagataaccagtttttgactatctcggctattgattttactatctaaatgcgtcgcaattccccataagacgaggataatggctacaattcctgctaaaaatgaatagagttttttcatgcttgctcctccttctcacgtgagataaagtaataaccaacaactaggataatactaaagagaaagacaagggcagacagggcattgatttctagcgaaatccccttgcgagcacgagagtaaatctcgactgacagggttgaaaagccatttcccgtcacaaagaatgtcacggcaaagtcatctagcgaataggtgaaggccatgaaataacctgcaattatagacggtgtcaggtaaggaagcatgatttccttgaacatctgaaattgactggcaccaaggtcataggccgcatgaatcatgtcaccgttcatttccttgagacgaggcaggaccatcaagaccacgataggaatcgagaaggccacgtgactagatagaacggtcaaaaagccaagtgaaaacttgagttgagtaaaaagaatcaagaagctggcaccaatcataacatcaggcgcaaccatgaggatattattgagtgaaagaaaggcttcttggtatttcttacgagactggtagatataaatagctccaaaagtcccgataatggtcgctatcaaggctgacaggaaggccaagaaaaaggtctgagtcacaatcaacataaggcgaccatcgccaaacatagttttaaaatggctcaagctaaagcctgtaaagctattcatgtcattgcctgcgttaaaggcatagccaatcagataaaagattggcaggtagaggacaagaaagaccagtcccagataaaggttggcaaattttttcatcgttctctcctttccttggtcacccacatagtgatgaacatggtcaagatgagaattacaccgatggttgaacccataccgtagttgtcattggttaggaaattctgttcaatagccgttcccagcgtaataacacggttcccaccaatcaaacgggtcagcatgaagaggctcaagctggggataaagacagactgaactccacttcgcacaccattcatcgataaagggaagatgacatggcggaaggtttcccacttggtcgcacctaggtcatagctggcattgatgagattgttgtccatatcgtccaagacattgaaaatgggcaaaatcataaaggggagctcgatgtagcttgcgacaaaaataaaggagaaatcagtaaagagcaactgttgcgaaccgattccgataaattccaaaaattggttaatagagccattttgaccaaaaattccgataaaggcataggctttaaggagcaaattgatccaggtaggcaggataatcagcataagccatagttgacggtgtttgagacgggtcaaaaagagggctgtcggataactgataagcagggtcacaaaggtcacaatccctgcataaagcactgagttgaaactcattttaagataggtcaagttttgtgacgcaaagtaagatttataattttctaaactaaactgaccttcaatgttgaaaaaggattgtccgaaaatcaagaccaagggtgcgaggacaaagagtacaatccaaagcatgtagggcactacaaagagtttagagcttgttttcttcatctctttcctcctcgattgcattgatcagacctgcttcttgctcttcgatttctacgtactcctcaatacgagcatcgaactcttcttcggtttcattgagacgcatgatgtggatgtcttctggttcaaagtccagaccgatttcctcaccaacaatggccttacgagtcgagtggatcatccattcatttccaagttcgtcataggcgataatttcatagtgaaccccacggaaaagctgggtatcgaccttaacttggagcttgccttcttcaggaagggtaatccgcaagtcttctggacgaataacaacctcaacaggttcatttggcttcatcccaccatcgaccgcttcaaagcgtttgccgttaaactcaaccaagtagtcctcaatcatggttcctggcaagatatttgactcaccgataaaggtggcaacaaagtggttaattggctcgtcgtagatgtccacaggtgttcctgactggacaatctcaccatcgttcataacaaaaatccagtcactcatagccaaagcttcttcctgatcgtgagtaacaaaaacaaaggtgattcccaatcgttgttgcagttcacgcagttcgtactgcatgtctgttcgtaattttaagtccaacgctgacaaaggctcgtccaacaaaaccacacgaggttggttgatgatggcacgtgcaatagccacacgctgacgttgtcctccagagagtttacggatggaacgtttttcgtaaccttctaactgaaccatcttgagaacttccgctacgcgtttctcgatttctttcttgtcaattttacgcaagcggagtggaaaggcaacattttcaaacacattcatatgtggaaacaaggcataggattggaagaccgtatggacgtctcgcttgttggttgggatgtcgttgatacgaacaccgtccagcaaaatatctccagtcgtagcatccagtaaacctgcaatgatgttaaggatagttgatttccctgaaccagacgcgcctagaagagtatagaacttcccttcttccaactcaaagttgatatctttgagaaccttggtgttgctgtcttcaaaaactttagagacgtttttgaattcaataattggttttttcaattgtcatttattccttctttttcatagattaacagatcagggctctgtcaggccgctactacctcgcgtaggagattgaactgcctacattcttctgcactgacgataggctttcaccccctttccatgacatagcagcagcttttcaactacagcttcctacttgctttcacccaagatacgaacttctctctcaagagtaacgccagagtgttccttgactttttcgataacagactcaatcaagtcctcgtagtctttagccgttccatcagcgacattgatcataaaacctgcgtgtttttctgagacttctactccaccaatacgatagcctttcaagccagcttcagaaattaactgacctgcaaaatgccctactggacgcttaaagaccgaaccacaagatggatattctaaaggttgcttgagttcacgtagatgcgtcaagcgatccatttcttgcttgataaccggatggcttcctggggctagggcaaatttagctgataagacaactgcaccagactcctgaatggctgaatggcggtaaccaaaagccaagtccttgacagatagggtctcgatttctccatccttggtcaaaattttacaagactgtaagatgtgggcaatctcgccaccataggcacccgcattcataaagacagcaccaccgacacttccaggaataccacaagcaaactcaaaaccagtcaaactatgacggagggcaatgcgagttgtttcaatcaagttagcaccagcctcagcttcgatggtatagccatcaacggaaacatgattgagcttgtcacacaagataacaaatccacgaatcccaccatcacgaacaatgatgttgctagcatttcccagcaccatccaagggatattttcttgattggcaaatttgacaacgcgcgccaactcaaaacgatttcgtggaaagaccaaataatcggcctctccacctacttttgtataactatagctatgcaagggttctttgaaacggatatcaatcccttctaagatttcaagcatgttttcttttactgacatgacactcttccttttacaaaattcattccattataccatttttaagaccatttgacgaccctaaaaaaatcttgggcttattttaaacaaaaaaagaggtttccccctttttcttatgattttttgcaaaagatagccttggttccataggcaactaggatcagttcaactagtagaatgacttcaactaagactggacttgtaagccagccaacttgggctagagatggtgccaggtcaaagaaggcatgtaggccataggctgctaggagataaatccatttcttctggcgaacagcttggtaaacccaaacagtcaaaagcaattggaaacctagagccaaaattcgctcaaaaccaagcaaataaatctgccagacagaaagtgactgaatggtttttaacatattttcagacagcaattgcatgacctgtggattctgagtttgaactgctgagagaacgatgtagagattaatcaaactagtaagacctaggaaaatcaactccaagccaccatgccccaatccataagccaaggcatctgccttttccaaacttctctttttctccaaccatttgaagaaaataagacgagccgtttcctcaaaaaatgctgccatggctaggccatagatgatatagacaagcggatggtcttgtaagagggcaatactaccgtctttttgaggatgtaaaaccaagatatgcaccagtttttccaaaatctgtgaagagacaaagaaggcaacagcccccaagcccaagacagctagattaatctggtgtttctttttggcataccaaatgcttcctatcaagaaagccagcaacagcaacatggtaataatgatatgaatggtcattttcttctcctattccgccttttcaatatcttttttcatctcgtcaacattgaacttagcaaacaagtattgacgatcttggactggaaaacgttggtccaactggtcaaccgctcccacctcgataatcccttccttgatgacaaagtccatgacatgcccaccgaaggtcaaatcatctgagatgaagtgtagatgatagcctgccacactgactccatggaaaatctctggcgtccagaaaccaacgatggttcccaccacattgtcacgacgatattcaggttgatgggttgcgacatcagcaaacttggtctctggtgtcgacttgggaatcatacgcacatgcatatgtgaaaattccccacgaatcttgatagagcggaaaagattttccccgtcataataagactcgattcgctcttccaattccttgtctgtcatctcaaaccgctggcggaaaatgacctctgcttgatgcggtactactgctgcataaggaatgagagcatctggtgatacttctacaatttctggttgctctcctgatcctttggcctgataagccttgccatccaagacaatcaattccccatcaatggaatccaaggttcccaaaccaaggtcaccatgctctagcaattctcctactgtcatggtaccaccataaaggccagccatcaaggctccaagggtattgtattgaaataatttcactggttcctgcacgttcttatccattcactttcttgtctgttatactcaatgaaaatcaaaaagcaaactaggaagcgagccgcaggttgctcaaagcactgctttgaagttgtagatagaactacatatatacggcaaggcgaagctgacgtggtttgaagagattttcgaagagtattattctataaatgttactcctaagtataccacatttgcccctagatgtgaacgagagaaacaccctagacattgccaagaaagaaaaaaaagggtacaatgtaacaaaatcaagggaggtctggaatgaagaaacaaagcaagtaccaagaggtcgtagcttatctaaaaaatagtatcgagtctggacgctttccaacgggtagccgactgccttctatccgtcaactgagccttgactttcattgtagcaaggacaccattcagagagcccttctggaattacggcacgaacaatacctctatgccaagccccagagtggctactatgtcctagaacaagggcaacaccaggatctagaaatcgaagtcactgacgaacatgccagtgcctatgacgatttccgactctgtgtcaatgaaaccttgattggccgggaaaactacctcttcaactactatgacaaccaagaaggattagaagacttaagacaatccattcataaactcctctttgaccaagccctctactgcaaggctgaccaactggtactgacttctggaacccaacaagccctttttatcctttctcaaatttcctttcctagtcaagccaaggaaatcttggtggaacagccgacctaccatcggatgaatcgcctcttgattgctcagggattggactatcaaacgattgaacgaggcattgatgggattgacttggaggagctggaaggtcacttcaaaacaggaaaaattaagtttttctataccattcctcgatttcactatcctctgggacattcctattcagagcaggacaaacgagctattcttgacttagctgccaagtatggtgtctatatcgtagaggacgactatctgggggatttggactccaagaagggccagaccttccactatcaggatacagagaagcgcgtcatttacataaagtccttctcaaccagcctctttccagccctgcggataacagcactcatccttccaaatgctatcaaggaagcctttgtggcctacaaaaatatcctagactacgacagcaacctcatcatgcaaaaggccctgtcactctatattgacagtcaattatttgagaaaaatcggctagctcgcttatccaatcaggaagactaccaaaaacaaatcgaggaaagactagataacactccttgtccccttcctcactttcccctacacgatggtttattacttgatctcagacagtatcctaaaatcgccagtctcaaacacagtcaactgggcttagacttctttgaagaggcctatttaagcacctgtccttatcaatttgccaaggtgtccttagacaatctggaaaatgttttagactatttaaaagcagaattggattgacttccaactctgcttttttcttatactcttcgaaaatcaaattcaaaccacgtcagcgtcgccttaccgtactcaagtacagcttgcggctagcttcctagtttgctctttgattttcattgagtattattcttcaacttctgttaaggttgccgctttttcaagatatttttggtaggtaccgtcatccttgagtttttggatgaccttgtccaccacttcttttaaatcagcactattttttctaagggcaactgcattagcttcgccgtccttcatcttcaagctgacagttgcgacagctaagtcggcgtttttagcagcatagctaagggcaacaggctcatccatgtgaacagcatctacttttccagcctgcaattcattgacagcttcacccatattggttagggaagtcaattgagcttttggcaattgttccttgaccatagcttctggaacagtccctttttgggctgcaatattagcactttcaaggctagttaaatccttgtatttttctacatcagacttacgaaccaagaaactaatcttgttttcatagtaagggattgaaaaatcaaagacttcttttctctcatcagtagcactaattcctgcaactgctaggtcagccttcccagtttgaagactggtcaaaacattgtcaaaactcatgcttgagatttccaatttcaccccaagttcatcagcgatagcttgggccatatcaatatccgcaccgactacctgatttttcccgtcaactaaggattggaattcaaaaggtgcatagtcaggactagtcgccacaactaatttccccttttgcttaatggcctcaacagctgactgagaaccattagaacccgactggcaagccactaagaagaaacttgcaagaaagctacataaaacaaatatccattttttcgatttcataaataaacgacctctctgttaattttgtataattataactctatccaagttgcttgtcaagtgtttttttgaatttttatcttaaaaatatttttttcattcaaaaaaggagctatctattgatttcaagctcctttttatacagaatgactctattttatagttcgacaatcttacctgtttcaaagtaaacaacccattcacagatattcttggcatagtctccaatacgttccaagaaggcaatcacttggaaataatcacgacctgtaacaatggcatcaggatttttcttgatttcttctgtagccaagtcacgaatgctatcaaagtaatggttgattttttcatccattgctgctacttcataggcctgatctactgaaccattgagatagagttcaagggctgcttcgacgaagttcttgacatcgcgacccattctctttatttcttcttcaacagctgggatgcgttgctcccccttcatacgaattgccgccttggcaatggaaacggcatggtcacccatacgttccaagtcagatacagccttcaagactgtcaaaacagtacgcaagtcctgagaaacgggttgttgaagggcaatcatttcaaatgatttcttttccaatttcacttcgtattcgttcacttctgcatcgtcttcgatgacttccttggccaaatcacggtcatgcgtaacaaaggcacgcactgtccgattgatttgggatagcacttcttgtcccattgcatagaactggttgtgcaatttctccaaatcttcttcaaattgagaacgtaacatcatttatctccttatccaaattttcctgaaatataatcttctgtttccttgtgttgtgggttgaggaacatcttcttagtatcgttaaactcaatcaaatctccatctaggaaaaatcctgtcttgtcagagatacgagaggcttgttgcatggaacgcgtaaccaagagcatggtgtatttatcttttagagcatacaaggtttcctcaatcttaccagccgagatagggtccagagctgaagtcggttcatccaagagaatgattttaggactagttgccaagacacgggcaacgcagacacgttgctgttgtccgcctgaaagcccgatagctgaatcatgcaggcgatccttgacctcatcccagatagaagctcgttgcaaggctttttcaaccgcctcatctagaacctgcttgtccttcactccattgatacgaagcccgtaaacaacattttcgtagatagacatagggaaggggtttggttgttggaaaaccataccgatttccttccgcaattcaactgtatctgtacgcgggctgtaaatgttgtggccgttataaaccactgaaccagttgtggttacctctggattaagatcccccatgcggttgatagcctttaggagggttgatttccctgatccagatggaccgatcaaggctgtaatttccttgggttggaaagatagggaaacactattcaaggcctttttttgattgtagtaaacggacaggtctgacacctgtaaaatcgcttctgtcatactgtttcctttctatccaaagtgtcctgttacgtagtcattggttgactgtagtttggcattttggaaaatattagaggtcttatcgtactcgatcaagtcacccaagtagaaaaatcctgtgtaatcactagcacgcgcagcctgctgcatgctgtgggtcacgatgattatggtgaaatctttcttcaattccaacatggtttcttccagctgagctgtcgcaatcggatccaaggctgacgctggctcatccatcaagagaatatctggtttaacagagatagcacgagcgatacagagacgttgttgctgaccaccagatagggtcaaggctgacttgtgcaaatcgtctttgacctggtcccaaagggcagcctgacggagagaggtttccacaatttcatccaagacttgcttgtccttaactcctgcacgttcatgggcaaaagtgatgttacggtagatagacttggcaaagggatttggtcgttggaagaccattccaatatgcttacgcatctcataaacattgatttctgggcggttgacatcaattccttgatagaggatttgacctgtgaccttagcaatatcaatggtatcattcatacggttgagactgcggaggtaggttgatttccctgaaccagaagggccaattaaggccgtaattttatttttttcaaattgcatatcgatgcccttgatggattcttttttaccgtagtaaacatgtaaatccttagtagagagggccactttctcttcaggaaaggtgatgatatacttttcatcccaattatattttgacatggcttctcctttaggcagcggttaatttcttatgtagatagcttccgagtttgcgggctccaaagttaaagatgaggataaagatgaggagcacggccgcagaacctgctgatacgatagttccatcaggaatggtaccttcactgttgactttccaaatgtggacagccaaggtttctgcttgacggaagattgagattgggctagtcacactgagaatgttccagtttgaccagtccagggctggagcggattgtcctgctgtataaatcaaagcagcagcctcaccaaagatacgaccagaagctaagacgaccccagtcacaatacctggaagagcttctggaatgaccacatggaccactgtctcccaacgagaaatcccaagggccaaaccagcctcacgttgcgtatggtgaacgtgtttcaagctgtcctcaacatttcgagtcatctgaggcaagttaaagactgtcaaggccaaggcacctgaaataattgaaaatccatactcaaactgaactacaaagatcaagtaaccaaagagacccacaaccactgatggcagtgaagacaagatttcaatacaggttctgacaaaattggtcacaggaccttttttagcatattcagctaggaaaatcccagcccccatagacaagggaacagagataatcaaggtaataaccaaaaggaagaaggaattatagagctgaattccaatccctccgcctgcttggtaagaagatgatttgccagtcaagaaagaccaagagatgtggggcaaaccacgaaccaagatataaagaatcaaggatgccaagatggcaacgataattcctgcaattgagtagaggacagctgttgcaattttatctaatttcttagcgtgcatagtttttctttcctctttctttcgtaatcaatttaatcacactgttgaaggccaaactcatcaaaagcaagactaaggccagtgaccagagaacgttattgtcaacggttcccataacagtatttccgatacccatggtcaaaacagaggtcaaggtcgcagcaggtgttgttagtgaagttgggactacggctgagtttccgaccaccatctgaatggctagagcttcaccaaaggcacgcgccatcccaaagaccactgctgtaaaaatccctgaacgcgctgccttcaaggtcacgcgccagatggtttgccagcgagtggcccccatagccaaactagcttcacgataatgacgaggcaccgcacgcaagctatcggttgtcataaaggttaccgtcggtaaaatcatgacaaagagaacaaaaatccctgacagaatcccaaaaccagttccaccaaagatactacggacaaaaggaactacgacctgcaaaccaataaatccatacacaactgaaggaatcccgaccagcaattcaatggctggttgcaagattctagcaccttttggtgagacctccgtcataaagactgccgcaccaatggcaaaaggagttgcgataagtgctgataggattgtgacaataaaggaacccaaaatcataggaagggcaccaaattgtttacctgaaggattccaagtttggccaaagaggaaatcaaagatattaaccccatttacaaagaaggtagacaaacctttttgggctacgaaaatcaaaatcatagccacgatgataacaatcaaagacagacaggcaaaggtcaagccttttcctaatttctctagacgagagttctttgagggagaaagtaattttttagctaattcttcttgattcattagtgactcccttctagtgctgtcaccgttcctacagcatctttttcaaccttcatttccttgacagaaatatagcccattcccttaacgattccactttgcgcttcatcagagaggacaaagttgaggaattctgccaccaattcatttggttgacctagggtgtacatgtgttcataagaccacaaaggccagttattgcttgtaacattttctgcaatcggctcatagccgttcaacttcatgcgtttcaccgagtcatccacataggcaaaggctaggtaagaaatggctcctggtgtctgggaaacaatgtttttgaccatcccatttgaatcctgttcttgactctgcacggccgattgaccatccatgataacactatcaaaggttgcacgtgaacctgaacttgccgcacggttgataatggaaatggctaggtctttcccaccgacttctttccagttggtcacttgacctgtgaagatgctacggagttgttcagttgtcagattttcaacatcaacttccttgttcacaatcactgccaagcccgctacagcaaccttgtgatctactagagctgatgcgttgataccgtctttttcctcggcaaatacgtctgaatttcctacatcaacggctccagactgaacctgagacagacctgtaccagatcctccaccttggacgttgactgttttcccaacgtgcagagagccaaattcatctgctgctgcttcgaccaaaggctgaagagccgttgaaccaacagctgtcatggattccccacgatcaatccagctagcacatcccgccaaagaacctgctagcaaaagagccgcaagggatagagcgagttttttcctttttttcactgtttttctccttgaaaataatggtgaatgctgtgaattttttcaactatttatttatgtttttcttttgaaaattgggagccaactgaagttctttgcttagttttactagtcatttgctcagttaccttgcccaccaattttgacttaaaatgaaagacaatttgaaaaaaatccatacttccactataacatagacaagctactttgactagcattttctcttgaatctgaggcctttaggaaaataatttttcaaaacatttccagtcaccttagcaaagcccaagccattacctttaaccaaaacttggtaccaaccatttggcagactttctgccagctgaacggtttctccagcgacatactttacaaacgcttcttgatcaatttcaacagactgcttgacctgactcggtttcaaggctagaccaagagcaaaactaggctcaaagcgtttcttcttaaaagtgcctagatgcaggccattccgagcaatcttgagtttccctaaatctggcaaaagttctggcaggagatagagttggtcaccaaaagtctgcaagatacccggtagattaactatcaagtggttttgggcaaattcctgccacaagacaacttgttctcggctgagattgctcttacttgccttaaatttaggagctggattgtcacccttaaactgtagatgagctacaaactgcccctctcccttaaaatgatgtgggtacatacgagccgtttctggcaggtcaataccagctaccattccattgatatgatcaactggtaacaagtcaaaatcatactcttccagcaaccaattgacgatctcttcgttttcctcgggtgcccaggtacaggtcgaataaaccagacgaccaccttcagctagcatggttaccgcatccgctagaatttctctttgcaagctagcacattgactaggataatcaagactccaatagtccatagcatctggttgcttacggaacatcccttcaccagagcaaggggcatcaaggacaatgaggtcaaaatagcccttaaaaaccttggccaaacggtcagcagattcattggtcaccacaacatttgtcgctccaaagcgctccatgttttctactaaaatcttagcccgtttgcttgaaatttcattggaaacaaggagaccctcccctgctagataggctgctaattgagttgatttaccacccggtgcagctgccaaatccaagaccttcataccagggctgggctgggctacctgagcaaccatctgagcagcgggttcttgcgaataaaccaaccctgtagcatgctcaggcgatttccctgaaaccttcccatagtggccccaaggagtttgaggaatggcatcaggaaaggaaactgtcgcttcttttaaaggattgatccgaaaagccgaaaccgcttcctcctcaaaagaggcaagaaaatctcttgcctcatctcctaatatctcttcatatttttcaacaaatccttctggaaattgcatctaagttcttttcctttcgtaaatataggactgaatttcctcctgcatctcaagaggtaacatcatgaccggttgtctggtttgaaaatcaagcggttgaccagatagggtcacaacccgatagcccagactttcccctaaaatacttgcagcggcataatcccatggttgcagataggtgacataggtcaacaaacgccctgacaaaatcttggcaaaactaatggccgcactcccatagacacgtacaccgaggaccgctcgacccaaatcagccagaccccattcattggtttccagcataccactattccctgcaataaggaaatctccaagtggttttgctttaaagggagctaggggcctatcatttagacaaactggaaattccccaccaccgtggtaacaatcccctttgaccacatcataaatcagaccaaactgtccctgaccattttcaaaataagccatcatgacagcaaaatcttcctgctgggccacaaaattattggtcccatcgatgggatcaatgacccaaaccttaccctctttaaccgaggctcgcagacacccttcttcagcacaaatcttatcctcaggataacgagacaaaatctcactaaccaagagttcctgaacttccttgtccagtctggtcaccaaatctgttggagaggacttggtttcaacacacaagtcttcctgcatatggtcaagaatgtactgacccgccttattgacaagctctttagcaaattcaaatttactttccaagagaaatcttcccttcccctttttccttggcagtctgaactgctcgataaagcgaatagccactaactgtttcaaattctcgtcccaaacgtttttcttcgctcttgcttggcacgaccgctttgaatcccttataggagtccagtaactttttagcctctaccttgccttcataggcagcttcaacatcattaaaaaaagaaagcactgaagcaagttcttcagtgctccacgacaaatctagtgggtaactatactgtttgttcattaactaataccagctctcattcttgcttcttttagttcttgcttacggtaactacgagggagaaaagcacgaatctcatcttcattaaaaccgatctgcatacgtttggcatcgataataattggacgacgcaaaagacttggatactgctcaatcaaatgaagcaattctgataccgaaatactttctacatcaatatctaatttttgaaaaatttttgaacgagttgaaatgatgtcatcagtaccattttcggtcaaggaaaggatgtgttgcaattcttttcttgttaaaggactggtcataatattgtgttcctcaaagggaaccttatgtttttctaaccaggcctttgccttacgacatgaagtacagctcggtgatagaaatagtgtaatcatgcttttctcttcttatctatactttgctacttctattatacaaaaaaataaagcgcttgactagagatttttagaaaaaaaagcctattttttcaagaaaaatagactgtttgcgaacgattaactctttttagatttgattaattcattcttgacaatagtttcgaatcacatacctaattgatttatgcaaaataagaatatctttcgtttcacttcctacggcttttcaggtatagaaaaccaaagaagctttcatagagggcaaaaaagaggaggaaggcatgaaggaagaaagtctctggtaaaatcagaatcactggatccttggctggatcaaaaagccaagtatcatctcccacaaagagaatttgatggaaaagggtaaagaattggtcaaaaccaatcaacactcctccaaggccaatcagcaaaggcaaaaccactagagtcagaagccctttactaaatagagataaaaagccctttttcacaatcctattgacaaagacgtaaaaacttggcagtgtcactaaagctactagctgaaccaggtgaaagaggttcttgaccactgcaaaatggtgtagcccagcagctgacgaacgaaaatctggcatctctaggacctgactaaatggattggtcagataattcatcaagatatgaaagttgtactgaatggtttctggttttaaatagacccgatccgttaaacttaaccactgaatttccagcggataaaaaatccaagccagatagatagtcagaaggattgagagggagagaagaaagagcatagagctccaaaaggtcagtttagttttcatcaaaatcccactccgcaaggctagaaaccacatgagtcggtgcaattggtaggtctgccacttcttctgccttggtaaaacctgttgtcaccaagagcgttggaatgccgttgtcaatcccagcccgaatatctgtcagatagttgtccccaaccataatcaactcttcacgttccaagcctaagtgctcaaccgccttgtccataatgatagcatttggtttcccgatataaacaggcttcactcgtgttgccacttcaagcagcgtaatcagtgaaccagcacctggcaaaagaccgcgttctgttggaatgttaaggtcagggttggttccgataaagtgagcacccttttggatagctagagttgctgtcgcaaatttttcatagtcaacttgccagtccaggcctactaccacataaggcaggattatccttgtcttccacataaccagccgccttgatggcttccttgagtcctgcttctccgatgacatagactgtcttttcaagtccccaagtcgttcatatagtcgatagtcgccaaagtcgctgtgtagacagtcgatagaggagtatcaatattaaaattctgagccaacatctcctgaacactctctggagtgcgggttgtattgttagtcacaaagagataggggatgtctcgcttttgcaattcgtggacaaaagcctctcctgctggaattcgatctttccccttataaatggttccgtctaaatcaattaaatagcctttatacttcatatttttctctaatccttcttcatttcttgccaagtgatgatagcttgggcattggtagccccgtcgcttgtaatctcatgcttgctttccagtccagtccgttcaacagccgatgtaatcaccccacctggtctaacttccttgacatacttgaggttgattttcttgggaatatattgggtcaaaaaatccgctcccataacctcaaaaatccagtccagatacttactgttattaacatgaccattcatatccaagtcgtaaaaacgaacatggtaatccttgctgaatggttcttccaaagactcatactttggcccacggataagctttttatcaaaatcagactgatacggagccacaatctcaggttcgacagcatggacttttcgactgtcgcggtccatgagaacaaaggtcgccatcatgtggatgagttcctgacctgcttcatcataaatgttaaagcgacggtagcaaaagagccgattgtagctcaaagcttccgtttcgatggtaatttcttccgcaaaacgaggcaaacgaaccacctcaatatcgtattctgtgataatccagaccagattatgctcttccaaaatggccttatcactaactcctaactcaatcgactgcatccctgaaacttgaagggatagcaaaatcacatctggaagcttgatatgaccgttcatatcagccatatcaaaaggaattttcattttcattcgataagttaagcccatcatctactccaaaataaatcgttctgctacggtgtctcctaaaaagagacctctttttgtcatacgaactcggtcaccatctatttgcatgagaccttgttgaaccaattctctgacaatttctccataaagtccatcaaaagatcttccaaatttttcctcaaatcgcgccatggagactcctgatttcttgcgaagccccaggaacatttcttcttccatttgctccttttgactcaggtgctcttctgtgatgcgcgcattgccttcctcaaccgcatttagataatgacgaatgggaccatgattcttatagcgcaccccattgacataaccagatgccccagcaccgatgccatagtattcagcattgtcccagtacatgaggttgtggcgactttcaaaaccaggctttgagaaattggaaatctcataatgctcaaaaccagctcgctccagctctgcaatgatgtactcaaacatctcagcttccagttcctccttaggcagaggcaatttccctcgtcgcatacggttcataaagaccgtatgattttccaaaatcaagctatacaaactcatatggggaatatccagcccaatggccttagccacattttccttgacctgctccatggtctggccaggcagcgcataaatcaaatcaatggagatgttgtcaaaaccagccagtttcaggcggtcgatattttcataaatatccttctccaaatgactgcgcccaatctttttcagcattttgtcgtcaaaggtttgcacacctagcgaaacacgattgacagccgagtttttcaaaacagctatcttatctgcatccaagtcgcctggattggcttcaatggtcaactcttctaagaaagacaagtccaagtttttagtcaagcccttcaataacacctccagttgagaagctgacaaagctgtcggtgtgccaccaccgatatagagggttctcaacttttgaatatcataagattgaaactcttctaacagatgttccaaataactatctaccggctgattcttgataaaaacttttgaaaagtcacaataataacaaatctgggtacaaaacgggatgtgcacataggctgacgttggttttttctgcatagtaattattataccacaaagaccggctacgagaaaaaaatcaccatccccagatacatagtccgtccagagatggtgatggtttattcttctgttatgtcaataacaatctcttctgattcatcaagagtttcagccttttcttgccattgctccttgagattattgaattgatcttttgatgcttctgtcgcttgacgaacacatgatttggcttgagaaaggacactgtccacagtgatttcacctgactcaacctgttctttagttttaagaacaaaatctgtagcctgctccttgacttctgtcagtttttcacagacctgctccttggcatactcaggatcttctctcaaatcatctagaaaatcttgagcctgactgcaaacttgtttgcccttgtcgcttgttaaaaacaaggcgagagctgcacctgaaacggttcctaaaaggattgaggatagtttacccataagaattctccttttttattttttgaaaaatttacttgctacacgaagagctgacaaacttgcaccagtcttaagtgtttttgaaccagctgaagaagctttcttgctcaagacacgcgcatggtcattgaggtctgaaacagatagagataaatctgccactgcactaaagagtggatcaatcgttgccaccttgacattgatatcatctgccaagacattgaccttagccagcaattcattggtatgatgcaaggtcacatccacatctgaagtcaaggttttaatcgtcttctctgtttcatcgataacacgtccaagcttttgtacagtaatgattaaatacactaaaaatacaatcaaagcaagggctacaagaatatatgcaacttctaacatttagttttcctcctctgaaatatagtaaggggccttctttcgattttgatatagaatgataaaaataccaagaccgataaggacaactgatagccattgagacactcgaagaccaaagaacatgagactatctgtccgcataccttcgatgaccatacgaccgaaaccataccaaatcaaatagaaagcagtgatatgacctcgtctaagactcttccattttcgtctgaatatcagaatcaaggcaaatccaagtagattccataaagactcataaaggaaggtcggctgacggtagctcccctcaatatacatctggtcacggataaagccaggtagataatccagattatccactgctgcaccataagcttcttggttaaagaaattgccccagcgccccaaactttgggcaatcatgacgctaggcgccgcaatatctagaaaatcccaagtattgatgagtttacgatcagcaaaaatatagagtacaagagccccagttatcaaaccaccgtaaatggccaaaccaccattccaaatggcaaaaatttctcccaagttctgactatagtaatcaaaacggaaaatgacatagtagagacgagctcctaaaatagccagaggaaaggctatcaagataaaatctaaaatatcgtctggtataattttctttctaggcgcttctttcatggtcaaataaaccgcaagaatcaagcctgtcacaatacacaaggcataccaacgaatggctagagggcctagatgaatagcaattggatcaagcattaggcacctcgttttgagcaataagatttgtcaagcgttcttcgaacaaacgcgtcgcatcaaagcccatttccttggcacgataattcatggcagcagcctcaatcacgacagagatattacgacctgttttaactggaatgcggatacgaggaatgcctacgccagaaatttctatttcctctgcattgtttccaaggcgatcaaaggtcttatgcgtatcataattttccaagtaaacagccagctggacttgtgaagaatccttgaccgcactcgcaccgtagaggctcataacatcgataatcccaaccccacgaatttcaatcaagtgtttcaagatttcagctggttcaccccaaagagtaatctcatccttggcaaagatatcgacacggtcatcagctaccaagcggtgaccacgtttgacaagctctagacctgtctcacttttaccaattccactatcgccctgaatcaagacacccataccatagatatccatcaagacaccgtgcacactggtacgttctgccaaacgagaatccaaatagctagataactctccagacaatcgactggtcgccgtacggctagttaaaatagcaatcttacattctctagctgcctttagcatctcctcaggaaccaccaaaccacgagcaacaataaccgcaggtgtctcaggtagaaacatttttttcaagacttggtaacggttgtgagaggacatcgaaacgagataggaccactccttcattcccaaaagttgaatccgctcaggcgtataatagtcaaaatagcccgtcatttcaagaccaggtcgcgtaatgtccgcggtattaatttccttttcaagtaattctggttcgccatagacaatgtctagtctaagcttttcaatcacttcttttactaaaaccgacatcatttcctccttcaatcgagttctttttactattatatcaaattgtccttagaagtttcagatttttgcaggctttgaagtatttatttatactcaatgaaaatcaaagagcaaactaggaaa

SEQ ID NO: 65 - DNA, 93022 bp, Streptococcus mitis NCTC 12261 contig11
tcatcatacaagtccaccttatactgcaggctgtagtctaaaccatgctctgctagaataggcaaatcacttttagcagcattgtagccaaccatgggtaaagaacccacaaactcttggaaatcttttataactttctccactggaggggcatcttttaatgtctcagctgtaatccctgtcaaaccattgataaaactctttagaggcacactagtatggacatatgaatcataggcagcgatttcctgaccatctctaaaacgcactgccgatacttgaatcaagtgtgtttgcccttcatgctgattaaattctaaatcgaaagcaatgtaatcttctaatcgttccattctatacctctcctatactgttattttatactaattcaaaccacgtcaacgtcgccttgccgtagatatatgtaactgacttcgtcagtcttatctacaacctcaaagcagtgctttgagcagcctgcggctagtttcctagtttgctctttgattttcattgagtattacttgagcaactatactatttagaaacaaaagaagccatcaggttagcatttaacctaaacagctccttgattatcctccaaataaacgagcaaaaaagcctttcttagttgattggacttcttcttttgcttggtccagctctagcttaagattttcttgatccttcatggcttgaagggtcaattgttgctgctgatcgagttgtttgtctttctcagcaatctgacggtctttgatgcgcatctgctcgtctttttctgataactgacgatccttggcttttaattgttcataaagacgaagaatttctgcattcttctcatcaaccagaatctccatcagttcacgttgcttgacatcttcactgacaggctcatcttcaaaaatcgtttttttatagatttcttctagcttaatcaagccacttctggtaacgactgttacccctttatcatttttatctgtgtcttcttctggtaattctttgacacggttattgattgcttggcgagataatcctaagacctctgcaatctcactgacggtcatttcaatactcataatatcctctgaaacgttttctagcttttctttacttaaatcttatcataagctagaaaaactgtcaaatttccgcttaatctaaagccttcaaaaaggctaacaagacttgggcagagcgacgtccagcttcgataataaactcatcaaaagagatgtttgcttcatggttggcattatcactcatagctcggatgactaaaactggaagattaagagcatgcgctgcctgagcaatagctgccccctccatctccacggctaaaacatctgggaaatgagacttaatcgcttctatcttgtcatttcctgcaacaaaactatctcctgtagcaatcaaaccaagatgccagttctggtccaattgagataaactctcttgaattttagcaataaaagttttatctgattcgaaataaagcggttgttgtgccatttgtccataagcatagccaaaagctgtgacattcacatcatgatagactaatttatcagcaatcacaacatccccaacagcaataccctctgctactgcaccagctgatcccgtattaataagagcatccacttgaaaatgatcagccaaaatcgccacactcatagcagacatgaccttaccaattccactttctacaagaacgacttcatgagaggcaatggttcctgtgtgataggtattccctaaaacaacttgctcttgggcattgtctaaatgctggaccagatacgccagttcttctggcatagccgcaataattcctattttcatttcaattccttttctattacaaaagtttcattgctaagacaagcaaaattaagagaaagatgactgcaaataagattttattcagtttagaattgaagacatttctcttggtattttcaatgcgacggcttttatgaatagacggttcgacctgaatcttcaaggtttcctggctaaaaccatgatccttaggattggcataaccaaaacgggaagaagaagttggtaaaatttttgtctcctcatcatctagcaaagggggacctgaaattttttcgcctctattagctctttcaatcatttcatccgttaataaaggtttacccatactgacctcctctattttttgtgcaattcccaatactgaacagccataattgtcttggcatcacaaatatgacctgattggatcaattccttggcttcttctaagctcacttcaagaacttccaaggtttcgtcttcatcctgcggacgcggatttttcacctttgtcaagtcgctcgctaggtatagttttaacttttcattacaaaagccaatggctgaataaaagtcatacaaaagttctaatttccctgtataggctgtttcttcctctaattcacgaagggctgctgcaacagggtctgtattttctcctacttccaactttccggctggaatttcgtaagagactgcctcgatagctttacggtactgcttgaccaagatgagtttttgctcatcggttacggctaaaacgcagacagctccattgtggaaaatcaaatcacgttgggcagttcccttaccttctggtaattcaacctggtcttgaaccagtttaaaaattggtccttgatagatttcttttcgactaagcgttttttcttcaaattccatgataggctcctactgattcttaggatgatgaggaaggcgagttgcatattcgtctttattgacctgacgtccacgaccaatagcaatagcatccgctggaacgtctttggtaatagttgaacccgcaccaacgagggaattgtcaccaagttctactggcgcaataatggttgaatttgaaccaacaaagacattgttaccaatgactgttttgtatttgtttttgccgtcatagttgactgtaatagttcctgcaccaaaattaaccttgctacccacttcacagtttccgatataagtcaaatgaccagccttagtattctcgccgatagaagaacctttcacctcaacaaagtttccaatatgaacttgggcacccagacttgaacctggacgaatgtgggcataagggccgactgttacgccgtcagcaacactgctttcctcaatcatagagttggtaatgacagctcctgctccgatagtgctatccaccacataagttccatttgtcaaaacagtctcagcaccaattttcgtttgcccttttaaggtaacattggcttcgatttgaacttcaggagcaatttcaacatcgatatcaatataagttgcttctggattgacaaagctaacgccattgaccatgtgttgacgattgatgcgacgacgcatcactgcttcagctgtcgcaagagccacacggtcatttactccaagactttcatcaaaatctttcaaagtataagcaccaactttttcaccagcttcacggaaaatgccaatgacatctgtaatatagtattcaccttgagcattgttggtattgatatttttcaaagcctcaaacaaacgctcgttgtcaaaaacgtaagttcctgtgttgatttccttgatttgtttttcaaaatctgtagcatccttctgctccacaatgcgaagaacctcagcattgtcattacgtacaattcgtccatagccaaaaggattatctgtttcagcagtcaagatagtcgccacatttttatgattgatgtggaaatcaatcaagtttttcaagctttcaccagtgattaaaggagtatctcctgcaatgaccaaggtgtgacctgacaaaccttctaagataggctctgtcatcataaccgcatgaccagttcccagctgttcagattgagtcacaaattctgtctgtccagccaagacctgctcaaccaattctgccttgtgtccaacaactgttactgtcttttcaggttggatagctcccacacttcggaaaacatgttccaacatggaaatacctgcaaccttgtgcaacacttttggcaaatcagatttcatgcgagttcctttacccgctgctaaaataatggcataatttgacataatcttctcttttctctagaaattcccttttattataccatatttcaaatcattccgcgcccttgaatgaaaaaatgctccaaagtcctttccttaacccattttttgagtattttttttgattttttttcatttttaaggtaaaattatgagatatgagaaagaaaattaatccgcttattttatttggtttttttgggattatgattttcattttaatcctgaatcgccctcgttttgaggaccatcctgtaaaaacaaagtcaaatatcgcgcaagtagaatcacaagcgctacataatatagataaaccggtaattgatgtttctggttggcaacgtcctgaggaaattaattacgatactctgtcgcaaaacatttctggagctattgttcgtgtccatagtggtgctcaaacgtccaaagagaacgatgcttcctatgttaatggtgttgataaggcctttaaaacccatatcacagagtttcaaaaacgaaatgtcccagttggtgtctatgcctatgtagctggaaaaaatgtccaggaaatggaaaaagctgctgaggtattctataacgcctcttcgccttacagtccaagttactattggctagacgtggaagaaaaaaccatgtccaatatgaacgagggtgttgaagcctttcgagcaaagctagaatcactgggtgctaaaaacatcggaatctacgttggggtctattttatggaagaacatagtattgatacagacaaatttacgtctgtgtggattccttcctatggttctgactcaggtttttacgagacaaccccaaaaactgatttagattacgacatccaccagtacacttctaaaggaaaaattgctggttttgaccatgatttggatatcaacgtcatctcttccttaaaaaacaaagaagaaacctttagaaaactctttttaaaaccataaaagcatttgtttagcatttgctttttctttttgtgtttgattgtgatacaatataataaggattttttgaaatagaaatagttggaggaaacatatgctctcatggttagcacgccttattaaagggattgtgattgctcttggatttatcctaccaggaatttccggaggggttctagcagcaatcttaggaatttatgaacggatgattggatttctggcccatccctttaaggactttaaagaaaatgttttgtactttattccagttgccatcggtatgcttctgggaatcggcttattttcctacccgattgaatacctgcttgaaaattatcaggtctttgtcttatggagctttgcgggcgccatcattggtacagttcctagcctcctcaaggaatcaactcgagaatctgaccgagacaagattgatttagcttggttctggacaacctttatcatctctggattaggactctatgccttaaattttgtcgttggaaccttaagtgccagctttcttaatttcgtcctagctggtgcactactggctcttggcgtattagttcctggcctcagcccatcaaacctacttttgattttgggcctctatgctcctatgctgacaggttttaaaacctttgacctcttgggaaccttcttcccgattggaatcggggcaggtgcaactctcatcattttttcaaaattgatggattatgccttaaacaactaccactcacgcgtctatcatttcatcatcggcatcgtcctatcaagtacccttttgatcttaattccaaatgcaggaaacactgaaagtatccaatacactggtatttctcttgttgggtatgtcatcatcgccttcttctttgcgttgggaatttggcttggtatttggatgagccaattggaggataagtataaataatggacaaaaaaagttaaaatcaaaaaaacattggtggaacaaatcctgtctaaggcaggtatcccacatcagggtattcaaatcaatgccctggaaggagagcttcctcaaggttatgaacgagatcagattttcaaaaccttggctcttttgggagataaaacaggaccaattatcggaattgtccctatcactcaacacttgtcggaaaagaaactagccaaaatttctggcaataaaaaagtgagcatgattccacaaaaggacttggaaaaaacaacaggttatattcatggagccaataatcccgtcggaattcgtcagaaacacaattatcccatttttatcgataagatcgctctagacttggatcaaatgattgtctctgcaggcgaagttggtcacagcattatcgtcgctccgcaagacttggctagctttgtaaaagctgactttgcagatatcttggagggtagccaagaatgaaactctactttgtccgccacggtcgtaccctctggaaccaggaaggacgctttcaaggtgctagtggagattctccccttcttcctgaatccattgaatccctaaaacaactaggccagtatctcaaggatattcctttcgaacagatttattcaagtgatttacctcgagcggtcaaatctgctgaaattatccaaagtcaactccagaccccctgtcctttagaaagtgtttctaatctctgtgaatggcagctggggaagttggaaggtttgaaaattgcaaccttggaatctatttaccctcaacaaatcaaagcttttcgatctaatcttgctcaatttgacactcaaatgtttggagccgaatccctctatagcaccacgcaacggaccatccaatttatcaaatcattaaaagatagtccagctgagtgtattctaattgtcggccacggtgccaatcttactgccagtctccgtactcttttaggttataaagaacctcttcttcgtaaagatggcggtctagcaaatgccagcctgacaattttagaaactcatgattttgaaacatttacactcgatacttggaatgatacttcctatcaataacagaacttgattttagcgtcaagttctttttagttttgaaagattatccgtgaatttcttgcttatttatgataaaatgggagtatcgcaaaaaatgactcatcgtattcaattttgagtaaaactaggaggatcccatgtcaacagaacatatggaagaactaaatgaccagcagatcgttcgccgtgaaaaaatggctgcgctccgtgaacaaggaattgatcctttcggaaaacgttttgaacgcactgcaaattcacaagaattaaaagataaatatgctgacctcgataaggaagaattacatgataaaaacgaaacagctactatcgcaggacgcttagtaactaaacgtggtaaaggtaaagtaggatttgcccaccttcaagaccgtgaaggccagattcaaatctacgttcgtaaggatgctgtcggtgaagaaaactacgagatcttcaaaaaagcagaccttggtgacttccttggtgtcgagggtgaagtgatgcgtacagatatgggagaactctctatcaaggcaactcacatcacacacttgtctaaggctcttcgtcctcttccagagaaattccatggtttgacagacgttgaaacgatttaccgtaaacgttaccttgacttgatttctaaccgtgaaagctttgagcgttttgtcactcgttcaaaaatcatctctgaaatccgtcgttaccttgaccaaaaaggattccttgaagtggaaacacctgttcttcacaacgaagctggtggagctgctgcccgtccatttatcactcaccacaatgcccaaaacattgatatggtgcttcgtatcgcaactgagcttcacttgaaacgccttatcgtcggtggtatggaacgtgtctatgaaattggccgtatcttccgtaatgaaggaatggatgctacacataaccctgagttcacttctatcgaagtttaccaagcttatgcagacttccaagacatcatggacttgactgaaggcattatccaacatgctgctaaagctgttaagggtgatggtccggttaactaccaaggtactgaaatcaagattaacgaaccatttaaacgtgttcacatggtggatgctatcaaagaaattactggtgtcgatttctggccagacatgactttggaagaagctaaagctatcgctgctgagaagaaagttcctgttgaaaaacactacactgaagttggccacattatcaatgccttctttgaagagtttgttgaagaaaccttgatccagccaacctttgtctatggacatccagtagctgtatctccgctcgctaagaaaaatcctgaagacgaacgctttactgaccgtttcgagctcttcatcatgactaaggagtacggtaatgcctttactgagttgaacgacccaatcgaccaacttagccgttttgaagcccaagctaaagctaaagaacttggtgacgatgaagcaaccggcatcgactatgactacatcgaagctcttgaatacggtatgccaccaacaggtggtttgggaatcggtatcgaccgtctctgcatgctccttactgatacaacaactatccgtgacgtattgctcttcccaacaatgaaataatcacttatcctctggctcttgtcaggggatttttcgatgcaaaaagagattgaggaaaactcaatctctacttttcacttctttggttgctacatcttctccaaaccatttttggctaatttcttggaacttcccttctttgtacagttgaacaaaggcttggtttaaagcttgtagtaatctcttgtctgctggtctaactccgactgcaaaggattcactttcaaatcctgctgaaaagacattgtagtcacttaatataccttcagactggagatagtaattagcatacactcggtcaatcaacaaggcatcaatccggtcatttttcaaatcaatcaaggcctcattaaaactctggtactgattagccttctgatctttgacacgatttttcaataaatctggctgggcttcaaagtctaaataaccagaggaaccggcttgggctcccaaggttttatccttcatatcctctactgaacgaatctgctggcttttctttgcaaccagaacttgctgattttccatataaggaatgctaaaggcaaccttctctcggcgttcatcagtggcagcatagccattccaaatggcatctatggttccattttgcagttccgtctccttcatatcccagtcaattggctgaaattgcaccttgacacctaatttttcagaaactgcttgtgctaaatcaatatcaaagcctgtatattggccattcttttcttcaaaacccatgggtacaaaggtattgtcaaaaccaatagtaatggtcccctgctcttgatacttatcccagttatccttctttggatcactagctttctgagtacaagccgttaaaaagagggtcaggagcgaaaccaatactaaagcaattttcttattagtcattggcacctcctacttgggttcaaccttgagaatctgatctgcgatattttcagcaaactgcaaatcatgggtaaccacaatctgggtcatgccaagttccctattttgcaagatcagtttttccacttccaagcgtaattcaggatctagggcagaagttggttcatcgtaacctatgatttctgggtcaatcatcatagcacgcgccaaagctacccgctgcttttgcccacctgatagtgagaatggataagcatctgcatgtcctgccagtcctaattgttccaaaagacctcgcgccttcttctctgcctcatcccgcttcattcccatggttttcacaggagataaggtcaaattatctagaacggataaatgagggaaaagttgaaaatcttggaatacaaatcctagtagattgcgcttctcaagttcgtccaattctaaaggttctccattataaaagatttgccctgaatcaatggtttcaagacctgcaagcatacgtaagagggttgtcttacctccaccagaaggtccaacgatagctaggatttgcttttcaggaatctttagactgaaattagacaaaatttgcttttcaccaaagcctttattgatatttcgtaattctaacatggcagcctcctatctatagtaactgtacttcttctcaacttttttggcaagaatggtcacaataccaatcaaaatcaagtaaatggctcctgccaagaacataggaaccaggctagcatcacggtttgcagctgtacgactagccaagataaggtctgaaattcctagagcatagaccagagaagtatctttgaccaaactcatgacttcgttaaatacgctaggaagaacaatctttgtcacctgaggcaaaataatatagcgaactgtggcaaaaggactgaacttcaagaccttagcagcctcatattgaccgttaggaatggtatcaatccctccacgaaagatttcagcaaagtaagccgcataattcagaacaaaggcaatgatagctgcaggaagacggtccaaacgaatcccaatacttggaagcacataataaataaaaatcaattgcaagagcaagggtgttcctcgcataatccagatataaatattaatcagatgatggaggggcttccaatggacttgcaaggcaaaggcaatcaaaacgcccaagggaatagaaaaaatcaagaccagtgcaaaaacctgcaaagtcatgcttgcaccgctcaataaactcggtaatatctcaaacaaataagacatactgcacctcctaaaaataatagatactattatagcataaataaacaaaacaaccaaccatttttgtaaaaaaattctctttaaaaaagaaaaaactatatctatcaaaaatgattagatacagtttttaaaaaaatattcttacaatctctcaaatagttcttgcatttgtacatcatctggaactagttttaagtaagtttgagcattgactttggcttcctcaaagtagcccaattcacgcaagagatagatatagtgttccagaaactctggattgtcctttaaatctcctgccaactcttgataatgctcgtaggcggtatctaaatcgtccatttcttgataagaacgagcaatcatccacttggtcaaaagattctctggctcatcattttgcaagtctagaatgtcctcataacgttcctgttctagataaattgtggctagacgaagtaagatttcttccgtatcctcagcatcttcttttgcagtaaggaggtagttttctgcaccactggcatcatgcagttcataagagaattgtgaagcagctagcaagagacgagtttcaaagggatttttctccaagccttgcttagcgatacgcagggcttcttgaacctgatgttccttatgcaaggcctgactataaccatactcatagccttcaaagtcaggagaaatggtatcaagctgcttaaagtagaggacagctttttggtattcttctcgatcaaagtaaagactagccaactcaaaagctgttaggtcatcgtattctaactctagggctttttctaaaaactctgtagccgtttcaaatttccctaactgtgcataggcaaagccaatccgttgataggtagaaatgcctgtttgctcataaatagtacgattatctaactgagcatagccttgaatggcctcttgataattttccaactcactatccaactctgctaatcccaatatcaagagaggatcctctgaataactcaaagcctccagcaatttctcacgcgccacatctgtcaaaccttccaactggtaaaggtctgccttaagtgccaaagccgaaacataccagtcactgtcagcttggaattcctcaaggtaggcaaatgcttcctcgatttgaccatcctcgctagcaatagttgctagattaagattaacctctggaaaatcttctacgattttcaggtaaatttccttggcctgaggataaaaaccaatcccttctagataggtggctaactcatacagaaggtcacttggatcattttctaaagctttgacgaaataatgttctgccttaactaaatcttgctcttccaaagcctgtaacatctgttgactattgttcactctttacttcctctccttctagttcatataggccactgactaccttataccattcgaaaatggctgaaatgacaactttagcagaagcataaaccggaataccgagtaaaactccccagataccaaacatggatcctgaagttaataaaacaaagagaacattaatgggatggatgtttaattgacttcccaaaatcaatggagagacaaaacggccttcaatagtttgttctacgataaagacaatcactacttttaaaagcatgactggcccagcaatcaagcccaatactagggcaggaagcatggctaagaagctacccaaataaggaaccagatttaaaataccagcagtaacccccaaagtaactgcataacgtagaccaataatcttgaagaaaatcataaacattaccgcaacaataatagccactgttacttgtcctcgaacatagttggacaactgttgattcacatctgataaaacctgcccaacaggttctttcaatttcgttggcatgaattgggtcaaatagtgacgtaggccttttccatcacgtaagagataaaagagcatgaacggaacgataatcaaggcaacaatcacttgagaagcaccgctaataaaggcacttacccagttgactgcctgagaagaaactttacttgcccaaactgtagcctgacttgaaaagtttgtcaaaacttgttctaactgaggtctgaaatcatctggtaaacgcttggttaccaaatcatcaataactctatctgcatcttcaaggtagattggtacatttcttgcaaatgttaaaacttgacgttgtagatttggaatagctactgccaagccccaaatgataaagagtgcaataatgacaaagacaatactgatggctatgacacgattgactttgtgtttttccatccaatcaacaatgggattcaataaataatatagcaggccagataaaatgactggcaacatcacaactgctaaaaagtccaaaacaggtgaaaatagaaaactaatcttacttaaaataaaaagattgagtcccaataataaggttaccaaaaataccgtaatggccttgttgtccaaaaaccacttgaaaaaccaagataggctaaaatgtttctctttttgttccataaataattcctttctgtcattctttcattataccatttttagagcaaaataactcttttttaaagtgcttacataccattgaattgtaccgcatatcatattgtgaatctattttgtgatataatagtattatctttataaagaggtatagtcatgaaagaaactgtttattttggaacttacacacgtcgaacttcccaagggatttacaaggcagactttgatacagaaactgggcagctttcaaatctagaactttttgtcagctgaaccaagtccaacctaccttgcctttgaccagcaccaacatttatacactgttggtagtcaagatgataaggggggaattgcagcctatcaaactgatggaaccttattaaatcatgtcgtggaagaaggagctccccactgttatgttgccgttgatgaaaagcgtgatttggtttacgcggcaaactaccacaagggacaggtccttgtttataaacgtcaggaagatggtcgccttctacttagcgatgtggatcaacacagtggccaaggtccgcatgagaatcaagcttctccccacgttcactttacagatttaacacctgaccactatctagtgacctgtgatttgggtactgaccaagtcatcacctatgaccttgatcaagaaggaaaattatctaaactctatacctatcatagccagccaggagcaggctcacgccatattattttccataaccactataaaattgcttatctgatttgtgaactcaatagcactatcgaagttttaatctacgatggtgttggcgaatttgaacgcatgcaagttatttcaactctaccagaaggttacgaaggttttaatggaactgctgctattcgtctctctaaagatggtaaatacctctacgcttctaaccgtggtcatgattctatagcagtatatacaattcttgcagacggtagcttagagttgttagaaatcgttccgactcatggtcagactccacgtgattttgatttgacaccagatcaagaatttgtcattgctatccatcaagactctgacaatgcaaccgtctttaaacgcaatcctgaaactggtcgtctagcagaactttccaacgacttccatgtcccagaagcagtctgcatcagttttgccccttaagaaaacataaaaaatgaacttggtaactcaagttcatttttttcttatagtctatttccgacattaatacggttaatggcacgctgcagtgcaatcttcgcacgacgttcttggtcaatcaagtgtttgtcttgtgcttcttcaatttcacgctctgctcgaagtttggcacgttctgcacgactaacgtcgatatcacgagcacgttctgcagagtcagcaacaattgtgataacgccattggcaacttcgataacacctccgtttactgcaatccagttcacgtgattttcatcatctacacgtttaaccttaacctcatctactgctaaaactgcaatcatattttcatgtcgtggcaagattacccatctcaccatccagagttcgaactgatacaaagctggcatggtgatcatagacgagaccatctggtgtcacgatctggacagttaactgagccatagatcacctcttaaaatcccattttttcagcttttgcaatcacatcttcgatagaacctacaccacggaaggcatcttctggcaagtggtcgtgtttaccatcaaggatttccttaaagccacgaacagtttcagcaactggaacataagaacctggctgaccagtaaattgttccgcaacgttgaagttttgtgacaagaagaactggatacgacgggcacgagcaaccaaggtcttttcttcatcagaaagctcatccataccaaggatagcaatgatatcttgcaattcatggtaacgttgaagaacgcgttttacttcagcagcaactgcatagtgctcttctccaacgatttcaggtgccaaggcacgtgagcttgaagcaagtgggtcaacggctgggtaaatacccaattgtaccaacttacgttccaagttagttgttgagtccaagtgagcgaaggctgttgctggcgctgggtcagtatagtcatccgctggcacatagatagcctggatagaggttacagaaccctttttagttgatgtaatacgctcttgcaattgacccatttccgtagcaagtgttggttggtaaccaacggctgatggcatacgacccaaaagggcagatacttctgaaccagcctgagtgaaacggaagatattatcgataaagagaagcacgtcttggccttccacatcacggaagtattcggcgattgtcaaaccagttagggcaacacgcatacgtgctcctggcggctcattcatctgaccaaataccatggctgttttctcgataacacctgattctttcatttcccagtaaaggtcattaccctcacgagtacgttccccaacaccggtaaatactgaaataccaccgtgttcttgggcaatgttgtgaatcaattcttggattaagacggttttaccaactccggcaccaccgaaaagtccaaccttaccacctttaaggtaaggggcaagaaggtcgataaccttaatccctgtttcaaggatttcagaagaggtagacaattcatcaaaagttggagcttttttatgaattggctgacgctctgcatcttctgtaaaaggagcttccaagtcaatggtatctcccaaaacattgaagacacgtcccaaagtttctttacctactggtacagagattggacgacctgtgtccaatacttccattccacgagtcaaaccatctgttgattccatggcgatagtacggaccataccatctcccaactccaaggctacttcaaggacgatttttgtttttctttcgtcatttttgtagacgacaagtgcattgttaatctcaggaagtttttcccctgctgcaaacaagacgtctacaacgggaccgataacctgagcaattttacctgaactcatctccttctcctattctatataagatactgtcggttcctagcttacctaggtcctaagttcattttcatacgagctagactagtggctattctaaggcactagctcctgctacgatttctgtaatttcttgtgtaatcgccgcctgtctggcacggttatactggattgtcaaatcattaatgactttcttagcattatctgtcgctgtttgcatggctgtcatacccgcagcattttcagctgtcttagcgtcgataatagcaccgtaaatcatactttctgcaaactgaggcaacaactgctccaaaatttcttctcggctagtttccaattcaaaggtcaagctgtaactgtcatctgcttcatttggatccaagtcaacaatcggaagcatttgttccacacgcatttgactagttagcgtattgacatgatggttatagcagacatagagttcatcaaaaagttcattttggtacatttcaacagtttttgaaataatcttacgaacttcatcaaagcttggttgatctgccaagccacgtagttcataaagtggttgaataccacgagctttaaagaaatcagctcccattccaccgatacagatcatttcaaaacctttaccatctggatggtattcttctttcagctccataacggctttcaaaatagaagaattataacctccaaccaaacctcggtctgatgtaatgacgatatagcctgtcttcttaactggacggctaatcaacatcggattggttgaactaccagctccattcccatgaagaatatccgtcaaaagtttacgaactttctgagcataaacttggaaattgcgagcagcttcttcagaacgacctagcttagcagctgataccatctgcatggcattagtgatttgactcgtattttttgttgaggcgatttttgttttaatatcatttagagatactgccatctgacacctctattcttattggaagctggtttgattgagaaactctgtaatcgcagcatccaagactgcttcttctggcaagtcttttgtatcacgaatggtttctaaaatctctggatgttgagcgtcaaagaaggcatggaactcttcctcgaaacgaacaatatcatctactggaacagtatccaagaaaccatgtgtcaaagcatagagaatggttacttgtttctcaacaggtaatggtttgtgaacaggttgtttcaagacttcaactgtacgacgtccacggttcaacttagcctgtgttgccgcatccaagtcagaaccaaacttagtgaaggcttccaactcacggtatgaagcaaggtcgatacgaagtgtaccagcaacctttttcatggctttgatttgtgcagaaccacctacacgagatacagatgaacctgcatcgatggctggacgaatacccgcattgaagagaccatcaccaaggaagatttgtccatcagtgattgaaatcacgttggttgcaatataggcagagatatctcctgcttgtgtctcgataaacggtagggctgtaatagatccaccaccaagttcatcagaaactttagctgagcgctcaagcaaacggctgtgaaggtagaaaacatcccctgggaatgcttcacgacctggaggacgacgaagcaagagagacagttcacgataagctaccgcttgttttgaaagatcatcataaacgatcaaaacatgcttcccttggtacataaattcttctgccatggcaaccccagcataaggagctaggaaaagcaatggagatggttgtgaagcagaggctgtcacaacgattgtgtagtccaaggcaccgtactgacgtagtgtttctacttgcgtacgaactgttgactctttttgtccaatcgctacgtagatacagatcatatcttgacctttttggttcaagattgtatcaatcgcaatagttgttttccctgtctgacggtcaccgataatcaactcacgttgaccacgaccaatcggtacaagggcgtcgatagctttcaaaccagtttgcaagggttctgatacagacttacgttgcataacaccaggagctggcgcttctactggacgagttttgtcagtgtggatttctccaagaccgtcaactggacgaccaagtgggtccacaacacgaccaatcagactttcacctactgggacttccatgattttacctgtacggcggattgtatcgccttcacggatatctgtaaagtcacctaggatgataataccaacgtctgttgactccaagttttgagccatcccataagagccgttttcaaaaatcaacaactctccactcatggcattttcaagaccgtgagcacgcgcgataccgtccccgatataggttacaacacctgtttcagtcacatcaaaattgggtttgaaattttcaatttgttgcttaattaaagcgctgatttcttgtgcgttaattgccaaaagaacaccactttctatttcaaattttctttaacaactttaagttgttgtttaatactcacatcaattgtcttgtgattggcaaaaatgacaaaaccaccaataagactttcatcgatttgttcttttacactccttactttaagagacatttttttctcaatcaaagggagcaagcgactcttctgttcatcagttaaaggatgagctgacctaatcgtcacttcaaatcgatttgtttctttttcaagtcggttcaagcaatctacaagaatatcataaaaaagatttgctctatgattgtagataagaacctggataaagttttgcaataaagtcgacactgaatcttggaagaacgcaatcgttttttccttgtcagactcgtctactgccactttttttaaaaaagaaggtaagcctgtttcttcagcaacttgcttgatttgagctaagtctgaaaagatacggtcttcttctcctttttctaaaaccaattggacaaaaggcatgctgtatttttcaattacctttactgttttcttgtccattaagcttctcctagctgatcgatatactgatcaatgagttctttatgggcatgaccgtcaaggttttgtgagatgattttaccagccaagctgattgtcaaatctgctacctcacccttaacgctttgtaaagcttcagctttattttgagcaatttcttggttcgctttttctttcaagcgtcctgcttctagcttagcatctgctaaaatactagctttgcttttctcagctgtttctttcgcattctcaatgattgtcttagcttctttacggctaccagccaattcatcttcgcgtttctgagccaatacttctgctttttgacgtgcttgttcagctccgtcaatatctgctgcaattttttctgctctttgttcgaaaatgctagtcaaatttgaccaagcgtatttcttaaccaagactagcaagagaataaaggaaccagcgattagtataaaatcaccaagtaattcacctactgttacattcataaactactcctttctattcttcatcattaattttatttcctaggtacattgaagataacaatgtaaatacatatgcttgtacacaagaaataaaaacagaaaatgcagtccagattagatttgttccaaaagcaataggataccaatagaaggcctgatgagaaagtaggactaacatacttgccatcacttcccctgcaaagatattaccaaatacccgcaatgcaagtgaaaggagattggtaacttcttctaagagattcattggtgtcataaaacctggtgttacaaatgcttttaaatactttttgattccacgacgacgaattccttctacgtgggtcattaagataattgtaaaagacaagaccaagtcaaatgacaaatttgctgttggtgaggtccaaagatttacaccatctgtagtctgaattctagccattaagccaatattatttgcaatggccataaataggaataaacagaaataaaagagagaataatcctttatcattggaccaaggtttgattttgtaaatccaacaacaaaatcaaataaatactctaatacattttgttttcctgtgggtctcaaagtcatatttcgagttgcccaataaataaagccaaaaataagtgctacagtcaacaaagtcaaaactactatggttaaattaaaggtaacaggaccaatattgatggttggattaatactttcttccatctaaaatcctccctttttcaatttatacttcttttatttgatgataaatgaaaagacaagagtaacgaagaaagtaccttcaataaaggcaacccctaggatcatcaaactacgtagttctgagatgatatctggttggcgagcaactgatttcaacaaaccgttcatcaacaaaccttcaccaagagatacacccatacaggcaagacatagaccgaaaaatgttaaattcatgacgaattctccttttaattaaaatttacttacttagtttagtcctaaaaattggatttgtcaactttttacttacgttgaaagcgtttaatgaaaattatttacaattttactatttttaagtctattatatagaaaactttggaaaaaacttgtaacaaatccctccattatctaggtctttctgaaaaataatgaaaaatccgagatgacatctcggatggaaattaatatattttctttaacctaatgctctttagtaagtaggattaaagggaaagcaactagaaagctttcgtctcctgcatgcttattaagcacgaactgtgacgctggtgccatcttccttataaagattgataagtccttctttgagagctcgaaccatatctccagcttgaacaggttgtggaaccttgatagtcaagagttccattggatttggagcgcggtcaattttattgcctttggcatcatgtaaatcttcgatatacgtttcaaaatgacggaaacctgggccataaaactcaacttggtcgccttcgttaataacgttccgttgacgaatagttgctgtttgtgtcgcatcatcataagaaaccacttcagcaacaaacttgtactcaggaattttacgacgagcaccaaacaactgctcattttcagatggtgtaccgtaatagaaacctgttgctaattcacgttgggcaaccttccacatctcatccaccaagtcttgtttgatagcttcaaacttttcaggactttcaagatatgcatccacagccgccttgtagcagttggttactgttgaaacatagtgaatagacttcattcgaccttcaatcttcagactgtccacaccattttcaatcatatctgggatatggtcaatcatggacatgtcaacagctgacattgaaaatgcttctgggatttcccctttcaagctcttacgttctttcccaaatggcatatcataaagatcatacttccaacggcaagactgagagcaaccaccacggttagcatcacgcatactcatgtggtttgaaagagtacaacgaccagagtaagaaatacacatggctccgtggacaaaggcttcaatctcaacatctgtacgtttgcggatttcagctaattcttccatcgaaacctcacgcgccaaaacgacacgagtcaagcccagttctttccagaactcaagggtttcatagttagttgcacttgcttgagtagagaggtggatttcaagacctggtgcttcagtcgctgcaatcatgatcaaggctgggtcagatacgataactgctgcaatcccgatatcacgcagtttacggaaccactcaccagcaccagcttcatttccttcgtgcataaccatattggcagctacatagactttggcaccgtacttggcagcaaactggacaccttcttccatctgttcgaaagtaaagtttccggcacggctacgaagaccataggcctgaccaccgataaagacagcatctgctccatattgaacagctacctttagcttctctaaagtccctgcaggtgataaaacctcaggacgttttaatgtttttgtcatgttttctcctatttgcaatataaaagtttgacgtttttccttctcattttatagtaaataagccataaaatcaagcctagacagattgttttgacaattctaatcttttagattattaaagcaaaaagattgtcaaagagaaaaagcccacagatgtgagcccttttctaatataggttaggaaaactatttctccacttcttttttcttgtgtgcaagaaatccaaatccactcaaaactcctagaagtcctaagactacaagattagcatgatcttctgtacctgtattaggcaattcctctctcttacttgctacagaagtcggaatttgtgaagtttcttttgtcgattgttcagttggtgtctttgattttggtacttctacctttggtgtctcaacctttggcgtttcaacctttggtgtttcaacttttggtgtttcaacttttggcgtttcaacctttggtgactcaacctttggtgactcaacctttggtgtttcaacttttggtgtttcaacttttggcatttcaacctttggtgtttcaacctttggcgtttcaacctttggtgtttcaacttttggcgtttcaacctttggtgcctcaacctttggtttcgtacctactgtgataacttcttctactgcttcttcagtaatcgtggttggttcattcggtgttactgctcctgtattaggatccaaggtataagttgtcgtagtagttgttttaccagctttaccaggtcttgttacttcacgataatctttatcttttgtattatcttctacataacgtattgtatatggagtagttgtttctacaactgttggtttcgtacctactataataacttcttctactgcttcttcagtaatcgtggttggttcgttcgatgttactgcacctgtattaggatttaaggtataagttgttgtagtagttgttttaccagctttaccagttcttgttacttctcgatagtctttatcttttgtattatcttctacataacgtgttgtatatggagtagttgtttctacaactgttggtttcgtacctactttaattggtttcgtacctactgtgataacttcttctactgcttcttcagtaatcgtggttggttcattcggtgttactgctcctgtattaggatccaaggtataagttgtcgtagtagttgttttaccagctttaccaggtcttgttacttcacgataatctttatcttttgtattatcttctacataacgtattgtatatggagtagttgtttctacaactgttggtttcgtacctactataataacttcttctactgcttcttcagtaatcgtggttggttcgttcgatgttactgcacctgtattaggatttaaggtataagttgttgtagtagttgttttaccagctttaccagttcttgttacttctcgatagtctttatcttttgtattatcttctacataacgtgttgtatatggagtagttgtttctacaactgttggtttcgtacctactttaaccacttttggtaccataggagtttctttttcagtcggcttaccgtcagttacaataccatcaagttcattcacaattttaggtgttgtagttacaattttaccttcgctaccgttcgattcaacaatttccgtaccatagtcgattgttttgtcttctacataagttgttgtaattggaatttttgtttctgtttctacaggtggtaagttattctcatacttctgtttatacacataggtaatgacagtttcacctttcacaatctctgtaatatcttgtttgtcttgttctttaaaggtataacgcttgttctcaaagtccaaatcggtcggatgagttaaagatacatcagaacctacttctttaagttcagatttaacactaggtgcaatttcaacaccttgttcgtttacaaacttctgagtcactaaacctttgttttgaacttctgtataagtaacagtatggaaagtgcgagacacaccgttgattgctttttctgtatctgtcaattcaactctttggagatttgatgcataaacaatgcgaggtgtaaactgattacgtttattaggaactactttactagcaatgtactctttttgagaaattgtattttctccaagtaaagatgtttcttgtctataagtgtaatcagcaccagctgaacgtacttcaaactcggataatttagattttggaatatcagaagacgttataacccctttacccttaaaaccttggacatctaagaattttgcatataaatctttaattggaataatatttccttgcttatccttataagtataagttcgagtataaccaatgaaatcagtatgattttcagcacgtcgagttaagtttttaataattacatgagtctcaacaggtttactgctaaatgtagcgtaaagtttggtttcttcaggtagcgtatactcaaatttagcagttgtctcaatactaccgataccgtaaatactagataaaacactatctgaacgaggtgtgatggtgtaactatacacagtgtttggagttagttccactatacgagcaggatacccgatattcacacgatttgttgcatatttatctgtaattccaattcgagcaggtaccttaataaatgtttctgtaacttcctcagtagttggtttcgatactgcattatacaaaccttgagaatcagttaactccaattcattcgctttcaaataccgaatttcaccgctacttgatgtaatcgggctaactgacgcttctttcgagacatcttcatcgatatctcgactatttacctgagaaactaatctagcttttactttaatataattagcattgataagagtatttttaaactcatcaatcttcgttctatccgctttcacttgctcttgttcagcttttgcagactctaaatcacgaatttgagcatctactttctcttcggcagttgtgcgtaaatgtgtaacctcagaagaactatttgcaacacctacattttcagtgggtgtttctgtaaccttaacccctaaagcttttacttcttcaactttagcttttaactcggtttcttttaccgtatgtgttgtactcgtttcatactcactttgaaccacagtttcgctaggtggagtctgtgctgcattaggaggtgtacttgaatttggctgttcatcagcgcttacaatcccatttaaaaataaactccctaaagcagtcgttaggataataccacttaacaaacctaacttagttttacggagatatccatgacctttttcttgttttactgctttatgcaatagaaacaccaactttcatttatttgtattgttaatattattacataattagctaaaaaagtaaaggtctcaactcaagaattaaatacaataaatttataaaaacttcctaactactatactagaattttctacaattcaaaaaacaatatcagaacggattgatactgatacgaaacaaaaaacaaaatgactctttatacatctatagtaggattcaagacagattatttatttcttaatcgatatataaaaggaatcctgattaaactgtctttaaaacttaagaaatcaaggatatgataaaaggaatggatatcagtatatctatttttaccatctcaaaagtagatccagagaatataactgttctcttatgatgagactttggaggcaaccattctgtcttgttttatgaaagaatagcttaaccttttacttaaaatattcagataaaaaaagagagaacgattttgttctctcgaaatccttatttttcatttactataagagtaaagtatttatagctttactcccactcaactgttgcaggtggtttacttgtaatatcatagacgatgcggttaacgtggtccacttcgtttacgatacgtacagaaatcttttgaaggacatcccaaggaatctttgcaaagtcagctgtcataccatcgatagaggtgatagcacggattgcaatcgtgtagtcatatgtacgaccgtcacccataacaccgactgaacgaacgcctgtgttcactgtgaagtattgccagatatcgcggtcaagacctgctttagcaatttcctcacgaaggatagcgtctgattcacgaacggtttctagtttctcttcagtgatttcacccatgacacggatagcaagtcctggtcctggaaatggttggcgccatacgatatggtctggcataccaagctctgtaccaagggcacgaacttcatctttatagagagtgttgagtggttcaatcaattcaaactgcatgtcttctggaagaccacccacgttgtggtgtgacttgatagtttgagctgtatctgtaccagactcgataacgtctgtgtataaggtaccttgagcaaggaatttcacatctttgagcttacttgcttcgtcatcaaagacatacacaaattcgttaccgatgattttacgtttttgttctgggtcagaaacgccagcaagtttatcaaggaaacgtttagcagcgtctgctttgacgatattcaaaccaaacttaccaccaagcatgtccataacttggtccgcttctcctttacgaagaagaccgtggtctacaaagatacagattaattgattgccaatagccttttggagaagaaccccaacaactgaagagtcaaccccacctgatagaccaagaaggacacgtttatcaccgacggtttcacgaattttttggatctgcatatcaatgaagttatccattgaccagtcgcctttagccttacagatgttaagggcaaagttacgaaggatgtcattcccgtatacagaatggcgaacttcagggtggaattggataccgtaaatgtgtttatctgggttttcgatggctgcgtatgggcagtcagctgatgtacctgtacgaacaaagtcagcaggaatttcagtaaccgcatcaccatggctcatcaaaacagtctgctcgtctggtgttgattcaaaaagagctgatgatgtgtgagtaagagttgattgaccgtattcacgatttccagcatcacctgcaggaacaacttttcctccaagtttatgggtcaataactgcataccataacaaattcccaaaataggaattccaagttcgaagatttctgggtcaatatcaaatgaaccatcttcgtatacagagtttggaccacctgaaaggatgattcctacagggttgatttcacgaacttcagcagctgaaattttatggctttttagttctgaaaaaacaccaatctcacggatacggcgtgaaatcagctggttgtattggctaccatagtccaatacgatgattttttctacatcttgcaaatcagttgaaatgttgctcatctttttcctttctcaaaagaaatatcttttttcaatattctatcacaaataagggcgaattaccaactaaacaaggcgaagtttgactttttctagtttattggggtacaatagagaaaagatagaaatgaagtgaaaaatatgctacccgcttatatgaaaatccatgatcagattaaaaaggatattgacgaacatcgttgggctattggtgagagacttcccagtgaaagagatttagcagagcagtttgaggtcagtcgcatgaccctccgacaagctatttccctcttggtcgaagaaggagttttagagcgccgtgtaggaagtggcacctttgtatccagtacacgtgtacaagaaaagatgagagggacaaccagttttactgaaattgttaagtcccaaggtaaagtaccctctagccaactcatttcctacagaaaaaccattcccaatgaacaggaagttgccaagctaggaatttctcctaccgaaaatattatccgaatggaacgtgttcgctatgccgaccaagttcctctggtttatgaagttgcttctattcctgaaaaattcattaaggactttaaaaaagaagaaatcaccagtcatttcttccaaaccttgcaaaaacacggctaccgtataggcaaatctcaacaaactatttatgctcgccttgctaaagaaaagattgcccactatttggaagttgaaaaaggacatgctattcttggtttgactcaggtttcctacctagaagatggtactgcttttgaatacgtaaaaagtcagtatgtaggcgaacgctttgaattttatcttgaaaataattagattactatgcaaaaactctctgtcacggacaaagagtcttttttatttctctaagagtaaatctttcaaagaaatcagagttacagcaaacaatatcattgccatgccaagaaaatcaataggataaaattgttcattcataattaggaaggcaaagaaaaccgccgagattggctcaattgaagccaacaaacttgacttgaccggtccaatcagactggctccttttaagaacgctgtataggcaaagacagtcccgataaggataatgcctgcaaaagcaagaagaaaatcaagactagttgggatagcagtctgtagaactcctgtaaaaggaagggcgactaaacctgctatgaccattcccacaccaatgaccaaactactcccccacttcttaatcaaggctatgggcaaaatgatataaagtgcgtaagtcagagaagaaaagagaccccagaacagaccggcaggtgtcatggataactggtccaactgcccatgagtggcgatcagaaaggtccctccgatggctaatatgatagaaacaatctctcccagtgtcggtgctaccttatccttgatacagctataaatcaaaatcccgacagggcaaacatactgaagcaccgtcgcggtccctgcattggtctcctgaatagcagttagataggcaaattggttgaggaagagaccaattagagcaaaaataagaagagacagcaaactcttcttatccgttaaaaaggccagcattttatcctttgcagtaacataagccaagaacatgagaatcccaccagcgattaaaagacgcaagttggtcaaaaccagagccgaaattccgtgcgccatcaggtattggccactcgttcctgacaagccccaagcaataccagccacaactgttagtaaagtcccttttaaactatttgacatgtctctccttactcttctttacgaatcaagtccatcacttgattgcggtctaatatccactgggctcgttcatccttttcataggtacgattcgataggaaaatgaccgcttcttgcttctggcgattccacatgataaaggtacctgtatagcccgtatggtctagccaatctccttccaaattccatgccaaagaacgttccttatcatccaaaggtgaaaagttttgactcaaatttcttgcaaaatcatctgctaaatagtgttctaaaaagatttgtaaatcctttacagtcgaaaacaaaccagcactaccagcatgtctacccaagagacgagccttgggatcatgaacttttcctgcctccacacctctgactgttggaacagcacgctcaacaggaccaaactgggtttccatcattccccaaggtttccagacttgctcctgtaaaatctcatccaggtcttgattaaagattctttccaaaataaaacccaacagcaaaaaatggacatccgaataaagaaaggctggctgatttcgtctcctgagatgaaacatagcttcctttaattctaaggctgttaaaagatctctattgggaataaaaggatcaagagctgttgcgtgagtcaagagctggcgaatagtgatatctggataatcactttcaggtaaaaaatcggttactggtctgtcaatatctaattgaccgttttcccacaaaaaagtaaaaacggtgccaacgccaacaaccttgctgacactagctaggtcataaactagtcctgcctcagtctgcaagccatgctctgggtcactctggcctaaatagacctccgtccattgattgtccttaaaatacgcaaaagaggctccgggatagatccctgcctcgatttgttcttctatttttttaataatcttggtccacttcatacttcttcaaaccacaattcaacattatttctatctttaccaaggaagaatttttcagacttaggaataaaatattctgtagactcaaacctctggcacagactggctaaatctaattcattgaccaagaacttgagcatagacaagtcccaggtaaccgtactgtccacagtcagatcctgcccctgagctggaataaaatcaagggattctccaacttcagatggctccaagaaactatcaacatcagttgggagatgtaattccatagaaatctcaaatttacttaaagaaattgattcgagatctgtttgaaatctaggcttttcttctacttctactagactttctctatcatcttccgcatgaatcaaaaccaaatcatcttcgggtgaaaaaatctcaaaagcgtagccattttgacctttatataattgatgaatcgaatctgttttagctaataaggcctcgatttctaagggattttctaccttgacaatcaatctagctagtttttttcttccctctaccttacgagtgcgcatacttggagcttcttctaaaaccagcttttctaaacctgtttgatcacctagtgacagaaaggctgactcttctaataaggccttcatgccaagggttcctatataaaatgtttcatttaattttctattattaacttttaaagtaggaataatccgtacaatctgatttacattcataaactcctccaactcttttattttaaaggattttagaattttttacaagaaattatgctcagatttacctttttttcgtaaaatttcatctaaaaaaccgaggatttcctcggtttcaatttcttataggtaaaggaatttgaagatagctactgcggcaattgctgctgcgatcggtgctactactggtacccaagagtaccaccattttgaatcacctttgtgctcaccaagaactgattttggaaggaaagcatgaaggagacgtggtcccaagtcacgggctgggttcaaggcaggtcctgtaggtccaccaagtgatgttaccaaggccataactaggaaacctagtgccaagtgagcaattccaagaccagatgtcataaatggtgctacttgttctttagcttggtcaagtgctgctgttacttgttcttgaggaatggtttgaccttgagtagttgcttgtgcaacttgagcattaatagccgcttgtgcttttgatactagttcagcaccaaagaagtttttagtcattccaagagctgcaaagaaaagaacaaatgaaccaacaaactcatttacaaaaccattaacagttgctgcaaaatgtgattcttttgtaccattatccaaacttgaaatggttgagaaagtacccaagatgttgtttggattttcagttttcaagtagtatgggcggtgtgttgccacaaccaaggcttgaccaaagatagcacccaaaacttgtgcgatgatataaggtgcaacttgtgcccaagggaagagaccgctgatcgcaagtccaagagtgaaggctgggttaatgtggttacctgatacgttaccaaacatcaaggctgggatcataacccccataccataaccaacagcgataacgatccagccactttggtgacctttcgtacctttaagttcaacgttggcaactgcaccatttccaagaatgatcaaaatagcagtggccaaaaattcagtggcatatttaattgcccatgtgaaatccatttgatagattctccttaaaattttttagacaatccttattctatcaatttttatatcttttagcaacaggttttctaaaagaatatatgggaaagcggttttatttctcttattgaaacaaaaggattaaagaggtggatttccttaatccgagagttcttattcttgacgttgtccgaaatctgcaatcatctgctccatttcttgtcgactcggagttgtcagcatataaaggtaatctccttgaagttccgcaaaggccgctggcatgatttttttaaccttgaaatactggctgtatttggcaagcaagtcctcctcagaataaacatagtgagcatttgcacgacgggatgtagctaaacaatattgagcttcaaagtctgacgctgggaactcttctcctgcgacaatcgccgcatagcctcggtagagatccaaggaatgagcaaagttataaacatcaatggtaaaaccacctgcaggacggttattgtactcaatggcaatgtagtcgtccccttcacggaagaactcaatatggaagaaccgttctttcataccaaattccttgacaatggcctcaccatatttacgtaatttgggatccatatccttaagaacatagtaggaattgtccatcttgtaaatcatgagatcaagcggtgtataggcgtagtcaaaagtcgttgagaagacaatcttaccatccttgtctacgagcccgtcaaaggtacagatttcactagaagtaacaaatttttcaaagaaataaacggtcgaatggtcccattcttgcttaaagtgattgatatcatcttctgtctcgagcttaaaggttgcggctgctcccactccattatcaggtttggcaatcattggaagaccaatttctttcactgcttgatcaacatctgcttccgtctggataacagctccaggtaccacagggacacctgcttttttgaagagtttcttcatttcagacttaaatttcgtctttttgagatcctctggtttggcaccaaagacattgaattgttctctgagtgttgcatccagctcaagccagtattcattatgagactcgatacggtcaattggcccatgtttataaaagagaaaagcaactgcacgtttgacttcatctatattttcaagattatctacgcggaaatactcagtcaggctattgcgtaaaggttcatccaattgctcgtatggttcttgaccaattcccaatactgtgatgcctttattagctagttcaatggtaaactgttgaaagttttgcggatagtagggagaaataacaaggtaattcataggtaactccttttataaatagagatttccaaggaaataaggcatttgtttgcgccaccattcccagtcgtgggcgacatcgtgtccccattcagcaaaccaggctggaatttgtttctggtcaaaggcttctttaagcttgtagaaagatggtagaccgtcttgttcccaggctccaagacccgtacacagcacaatctctgcctgacggtaacggtcaataaaccagccgtcattctgattccagatataatctactggcgagttttgataaatagcatcgtcattgtagtaatcgccaacaaagaaacgtgcgtcgtaaacaccactaagagcaatcacctttgtaaaaacatctggatgttggagaaaaaagttgactgcatggtaggcgcccatcgagcaacctgtcgtcatcataccatcaaaccaacctgtcttatgcttgataaaaggaatagcctcctcaatcacatagcgttcataggcacggtgcatttccgcttggtcgtgaccatttttccaagtggccaaccagctctcactatctacactggatagggtaaagaactgaacacggccttcctcgataaaagaagcacaagcatcaatcatgccaaaatcatagtattcattgtgactaccacctgatgaagcaaagaccacaactggaatccctgcatgtccataacgattaaggtacatttcacggttaagattgccactccagtggctaaggttttcaatatgcattggctttctccttttctaacttaccatttctctgcaaaaaatctcagacagtctggtaaattctccgaccaagggatttcactatggatggcaccagattgaactttcaagacaagattatctaagtgtaccccacctgctatcaaatcatggtaataccgaagagacgaatcgatataggcttgtttgatattaccagccatcagggtcttgtccgtatcatctgcttcttcagttccaacatagataaagatacgctggtcaggcgatagtttctggcgctcgatgtagcgattaaaggcttcttgatggagccagttggcagatgaaaagacgcccaagcaaccaatttggtcttggtattccaaaccgataaactgggtaatattgcctcctagtgaagacccaatcatagccgtatgctggcagtcagctttagtacggtaggtctcatcgataaatggcttgaccacctccataacaaactcggcatactccacgcccttaccgccaaattgctgtcctgggataggagattcttggaacttccaagccgcatactcattcatccgccccataccatcattgtcaatggcgacgacaatcatgcgactgatatcaggattacgcttaatagctgggataatcttccatgaatgtccaatgaaagactccttgctataaaaaacattttgcccgtcatgaaagtaaacaacaggataggaacgatccgtgtctttctcataatctttaggcagaagaacacgtacacggcgttccttacctgtatatggaaccttgagtttgtgttctttcatttttaaataaaagtaggattgattcattgtcagaaaactctctatattcaaaattttatctcattataccataaaaatagaaaaaaagttagttttgcttccgtttttggaattaaaaactaactttttcatttaattttctaaattcttttggattttctgattagagcatattgtcaatcaagtcatccacttcatctttttcagcctgcggtgtaatctcagtaatcatgattccagccactgctcgctcaactaaaccttcaacatccatacgagcttcatactgctccgcattcttaatcttaggatttgttttcggacgatctggcgcaaaaatggtacaacagtcttcaaaaggctggatagaaatttcaaaggtgtcaatttcctgagcaatgtcaatgatttccaacttatccattgtcacaactggacggatgatgggagtgttggtaactgcattgatagcctgcatgctctccaaggtttggctggctacttgacctaggctttccccattgatgataactaaaccatttcgtacctcacgaatacgatctgtaatccgcatcataaaacgacgcgttagagtcatcaagtaagcttctggcgctttggccttgatttcctcttgaatctctgtgaaaggtacttcaataaactggatatttcccccaaacttggttaatttacgggtcaaatcttgggcttttttaagagcaccaggactcgtgtaaggtgggctggcaaaatgaacagcctcaatatccaccccacgcttaagtgcaagataacctgctacaggtgagtcgatccctcctgacaacatgagcatccctttacctgaagttccaactggcaaaccaccagccccacgaatggtttcataagaaagataggctgcttcttcacggatttccacctgaagattgatgtcaggacttttcatttgagcttgcacatttggaatggcttcgaaaacagctcctccaagtgtttgattgagttcacgactatccaactcaaagttgtggtcgctacgcttgccagaaattttaaaggtcatgccatccttgtagatgtcctgcataatctcttggacagcagacttcagaacttctacagatttttcgaccttataaacaggagaaaagttttgaatcccaaaaacttgtttgagtgattctgctactgctgtgtaatctgctccatttaggtaagcgtgggcacggtcacgatctgccgttaccttaacttggggatagatagacaaaacgtctgatatattattgcgaagtttattgatgaaacgcatacgatttttacccttggttgacaactctccgtagcgaatcataatttctgaatactgcataaatgctcctatcttacttttctagtttgattgtaaattaattttagcttggtcaaaaactgctcgacctgactcatatcattttcaaggtctagactaagacgcacagctgactgggccttatccttgtccactcccatggcaatcaaggtgccagcaggtttcccagccttggacgaacaagcagaggtcgttgagatgaaaatatcatagtcttcaaaggcgtgaacgatgacttcaccacgaacacccttgattccaaaagtcaggatatgaggggcaaagtcttcctcatctgaaaagacaaatatatctggataatctaaaagagcttggcgaatcactgccttcatctgcccagtcttgctagtaaagacatctagcttttccatggacaaacgcagagccttggctgtcgctgctatccctgccacattttcagttgtcgaacgataatcatgctcctgaccaccaccagtcaaaagaggcgtaatcttcttgccagacttgatatagacaaaaccaacaccacgaactccgtggaacttgtgaccagagaaagtcgcaaaatccactcgttctgtcagatacttttcagtcggaatcttggcaagtgcctgaaccgcatcaacgtggaaggaaatagttggcttgtctgccaatagttctgaaatagcttgaataggttgaatcgagccgatttcattgttcacagccatgacggaaacgagggtcgtatcaggtcttatcaaatctgataacgcttcaacatttacaaatcctttgttatcaactggagcaaaatctacttcaaatccttgacttttcaaccagagggctgactctttgactgccggatgttcaatggctgatacaatgatgtgttttccaaactgagccttttcaaaggtcacacccttgatgacccagttatctccttctgtcccaccagaagtaaagaagatttcatcgcttttcttaccgattaaatctgcaatctgttggcgagaagcatctaagattcgtgttgcctggtctcccaaacgatggagactagatggatttcctaaaatttttgaagcgacctgcatataagtttcaagggcttcaggatagggcttggtcgtcgccgaattatcaaagtaaatcatgttttctcacgctttctaaaatcactccttctattgtatcatgaaacggagtctgcgacaagaaagggcaattcctctttttttaagatttttttaaagaaatgcggtataataaattttaattaaaggagagaatatatgtctaattatcgtagaacttcaaaaccaaaaacagaacacatcaaaaaaggctttacggtctttcaaaaaactgttgccactatcggtagtatccttggcttaattactgcaagtatcactatcatgaacgccttggataataataaaaatactaaaaaagaacctacgacaagccagacgacaacaattgtcaaagaaattcaaaaggaatcccctcaggaaaacactagtcccaataaggaaaataacacttctcaagaaaaaacacagcaagaggaaacaccaaaatctagcgtcaaggaagagaaaaaagaagagcagaaagcagcaactcaggattcttctactcctactccaagtaaacctgctactgaaaatgaaaaacagtccaataccccaacttcggaaaataaaactaatcaataatcactaaaatagcctccttccaaacttggaaagaagctattttttttattgttgtaaaacttttcttggtttggtaccttcagctggaccaatgacacctgccatctcaagctcttccatgagacgggtcgcacggttaaatccaactgacaaacgacgctgaatcatagatgcgctggctttctgggtttcgattaccaaagccttggcttcttcaaagagcggatcaccaccagattcaccatctgaaaattctccgtcattttcagaaacctcacctggatcaaaactctcatcgtagtccgcatcagcctgagccttaatgaagtttacgatacgttcgacatcatcatccgagataaaggagccttggagacgaactggatgattttcatcaattggtttaaagagcatatctccacgtccaagcagtttctcagctccattttcatctaaaatagtacgggagtctgttcctgatgaaactgcgaaagcgacacgagatgggacattggccttgatcagaccagaaatgacgtcaacggatggacgctgggttgcaagaatcatgtggatacctgcagcacgcgccttctgtccgagacgaatgatagcatcttccacttccttgctggctaccatcataaggtcagccaactcatccacaattacaacaatgagtggtagcggaacctgcttgtactcagactgagcattaaactcttctaccttggcattaaaacctgcaatattccgaactcccaccttggcaaagagttcataacgattttccatttcatccacgaccttttgcaaagccttgctggccttacgtggattggtcacgactggaatcaagaggtggggaatatcattgtaaacagacaactcaaccatcttgggatcgaccatcataaatttaacttggtcaggtctcgccttcatgaggatgctagcgataatgccgttaacagctactgacttccctgaacccgttgaacctgcaactagcaagtggggcatcttggaaaggtcaaaagctcttgcggtgccattaactgcctttcctagaggaatttctaagagattttctgctttcgtttgagattgttcccatagttcgcggaaggataccgtcgcaatctcagagttaggaacctcaatcccgactaaggatttaccaggtattggagcctcaatccggacatccttggctgccaaggctagagcgaggtcatctgctagattggaaatgcggttaacccgtacaccgactgctggcttgacttcatacttggtcactgacggcccaatttcagcccgttcaaccgttaccttaataccaaaactagcaaaagtttcttctaggattttgatgttttcacgaacgattttcttctctttcgactggtcttttggtttatctggggcaaagagttgtaagcttggaagtttgtattcaagggcttccttggctgaaaaatcgacctgaacatcttcgtcatcagagttatctccctgttcagggaattcaagttcagcttgaggcaggatgatttctggttctacccactcttcttctggaaaaggtggaacgtcaggcacaacatctgctgtcagaatttcacctgtttccatatcaataggaggcaaatcgagtaaggctttttcagcctcttcttgttctaatctagcctcttcctcagccttttggcgagctttttcttcttgtttaacaaagcgttcctcttttcgacgctcatgcccttcccgccatttggcaaagcctttactgcaaaattcagcaatatcgtaaacagaccaaggactgactaggagggcacccactaaaatcaagatagaaccaataaagtaagtaccgatatttgagaagagaaaggctgttggcacatagagtccaacaccaatcaagcctccaccagcaaaactggtcgttcgaaaaccagttaaatccgtcacaacctgagccatggttccttttagaacggacttgtccaaaccatatttccaaaccaagtaagcctcgaaaatcaagagcaaaccagcaaatatggttaaaaagcctgataggagtccttcctgttttcgtatccacttgaaaaagaagaggtagagcaggatgccaaatattgccagataagctaggctacccaccagcaagcgaatgaaattgtaaagggttatacctgcagcccctaatttgaaggctgcgaaaatcaataaaagcgcgattcccaacgaaatcaacattcgttgaatcgcttcttttctttcgagttctgctttagacggtctccgtcttgttttacttgtattcttgtttgccattcttctattataccatatttcacaggcatttcggaaagagaaaaagactgcaccaaacggtccaatcttttcatttttctattttttatgcttgtggtttgcgtaggtaaccatagaccacaccacttacgattgctcctaccaagacagaaacgaggtaaagaagagcatttgaagtaagggcaataacgaagattcctccgtgtggcgccatgagtttgataccagtaagaccaacgagtccacctgctactgctgaaccaaggatgaagcttgggatagcacgagctgggtcagcggcaccaaatggaattgctccctcagtgataaatgacaagcccatgatgatgtttgtcaaaccagagttgcgttcttctttagtaaatttatctttgaaaagaagagttgcgacaaagattgcaagtggtggcaccattcctccagccataactgctgccatggctacagaaccacctgaagaaacagttgctgcaagcgtacctgtaccaaagacataagccgctttgttgactggtccccccatgtcaacagccatcattccaccaaggacgataccaagaaggacagctgaacctcctccaagaccgcctaggaagtcattcatagcagtattgattgctgccattgggatattcacagctagcatgacaaatccagtcaagattgttccaagaagtggcaagagaaggattgattttgcaccttcaagtgaacgaggaactttaacgtatttcttgatagcaagaactaaagcacctgcgataaatccaccaacaagggcacctaggaaaccagatgagacacctgcaagagttgaagttgcttcaccacctgcggcataaggaattttaccaaaggcaaaaccttctttggcaatagcaccagccacgaaacctgctaccaaacctggtttttcagcgatagagtatgcaacataacctgcaaagactgggagcatcaaaccaaaggcagctccaccaattttcataaacatagaagctagctcatggtaggaaccaagattaccaagattttcatttggaacacccaaagcaccgtcaatcaagaaggcaagggcaatcatgataccaccacctataacgaatggcaacatttgagatacaccactcatcaagtgtttgtagaaggcaccaccaaggctttgtttttcgttgcttgctgtcgaagcttttgctccattagcagcacggtagacttcagcatctcctgaaagagccaagttaatcaattcttctgttttacggatcccgtcagcaactggacgattgatcaatggtttgccatcgaaacgatccatctcaaccgccttgtctgcagcgatgataacagctttagccttgcggatgtcctcagcagttagttggtttccaacaccgctagcaccgttggtttcaaccttgattccaacacccatttcagcagccactttttgaagggcttcttgagccatgtaagtgtgagcaatacctgttgtacaagctgtaacagcaacgataaactcatcagagtcattagtaggtgcttgaacaggctcttcagttttttcggaagctttgtcaaaaagttcgataacttggtcagctgatgttacttgacgaagtttgtcagcaaaaccgtctttcatcaagtattgagacaattctgccaaggctgccaagtgagtatcattggcaccttctggagctgcaatcataaagaagaggtcagttgattgtccatccaagctctcgtagtcaacacccttgtttgacttggcaaagagaactgtcgcttctttgacagcagcatttttgctgtgaggcattgcgataccatcacccaaacctgtagaagtgagagcttcacgcgccaaaattccttctttaaaggtttcaaaatctgtcacataaccgtggtctgtcaaacttttaatcatctcgtcgatgacagctgttttttcagttgcttgcaaatccagcaacataacatcttttctcaataggtcttgaattttcatcgtttttctacctcaactttttcatatgtttctttaataaattctgctgttgccaagtcatccgagaaggtagttgccgttccacaagcaactccccatttgaaggcttctactgcgtcttttgatttgacaaattcacctgtgaatccggcaaccatagaatcaccagcaccaactgaatttttgactgttcccttgataggttttgcgaagtaagctccctcagatgtgacaagaagggcaccgtcgccagccatggagataatgacgttttgagctcctttggccagtaactgacgagcatagttctcgatttcatctaaactttcgagtttcactccaaagatagctccaagctcgtgattatttggtttgaccaaaagtggctgatagtccaaactatcaatcaaggtctgtccttcaaagtcacaaacgacttgcgcaccagtcttgcgtgtcaaggcaatcaaatccttgtagataacattgcctaggtttttagcactcgaacccgcaaagacaaccgtatcttctgctgtcagactagataaaatagctttcaattcttctagctgagctggttcgacatttggaccggttccgttgatttctgtttcttggtctgctttgattttaacattgatacgagtatcttctgccacttggacaaaacatgtctcgatttcttcctctgcaagggtatctgtgataaatttaccagtaaagcctccgataaatcccgtcgctgtatttggtatatccaaacgtttcaagacacggctgacattgattcctttcccaccagcaaacttatcatcactgtccatacgattgacactaccgacttggacttggtccaaacgaacgatatagtcaatggatggattgagtgtgactgtataaatcatacttctattacctccgttttctccttaatagcctgcaagagctcatgcccttgacttgtgataacaatagctcgtttgagtggtgctaccttggcaaagcaagtttgtccaatttttgacgaatccaccaagacataggtctgtttggcattttctaaaatagcacgcttaacagctccctcctccatatcaggagtcgtataatagccatcgtccacaccattcatcccgataaaggcacggtcaaagtgcaattggttaatctggttaagagcaacgcccccgatgctagcatctgttgccatcttgacacttcctccaaccatgacagttggaatctgcttttcaaccaactgtgcggcatggtgaatcgaatttgtcacaacagtaatattcttattgaccaattcatggatcaaaaaagcagttgttgttccagcatcgataaagatgacatcttgttccttaatgagagaggctgctttctgagccagcaacttcttttcttgaaggtttttgacagatttttcttgaatggtttcttcttcctgcaaggaatggggcaattctgctccaccatgcacgcgacgaagcttgttttccgcttccaactcatccaagtctcttcgaaccgttgattctgaggtctctagcaaactaactaatttttctagagaaactacatgatgttgatttaactcctctaaaatcagttgtttccgctctgtttttaacactgaatcacctcctgttatcgtttacactattcattctatcacactttctttcaaagtcaagcattttttgtcattttctttcaaaatctatcatttttcttatttctagaatttttattgcaagataggggcctttatggtagactatttgagtaagtattggaagattactcaagaggcttaagaggccgtgttggaaacgcggtaggcgtgtaacagcgtgcgtgggttcgaatcccatgtcttccgtttattttaaaaaagatacccaagaaatctgtactgaccccaaaaagttagacaattaatttaagcaaaggatttagttctgtattgtacagggctaagtccttttagttttaccttaattcgtttgttgttgtagtaatcaatatagtctacaatagcttgttccaagtgttcaagtgactgaaacgtattctcataaccataaaacatttcagacttaagaatgccaaagaaagattccatcataccgttatctggactatttcccttacgtgacatagatggttggattcccttattctttaaaaaatgatgatagaaatcgtgttggtattgccatccttggtcactatggagaattgtattttcgtaatggttctctgtaaaggcttgttctagcatagctttcatttgtactaagttcggcgaagtagaaagattgtaggagataatttctctgttaaagccatctaaaactggtgataaataaagcttttggctgcttgctggaatggcaaattctgtcacatctgtgtagcacttttgcattggtttggttgcttcaaattgacgttgaataagattatctgctttcttgccaacctctccttggtatgaagaatacttccgtttacggcgaattcgagccgttaaaccaagtactttcatcagacgctgcaccttcttatggttcactacgaagccacgatttcgtaattctagagtcatgcgacgatagccgtaatttcctttatgctcagtataaattgactgaatttcagctttaatatcataatctttatcgctttgatccagctgttttaagtggtaataataagttgaacgggcaagtttaataatctttagaaggatatctaaagaaaactctgttaccagtccttgaacaatttccgtttttcttcttgctccttttcgtctctcaatcggagttctctcaacttttttagaatggcattctccgctctcaagtactcattttctgcttgaagacgttctaattctgtcatatcttcaaatctcttctttggcttacgtcccattttaggtggtctccctcttgttttctcaacaatagtatacccgtttttcttatattgtgccagccaattcgaaagtaatccactacttagaagagcataatccagagacgccctaatttgtgaatgcccctcaagaagaactttatcaatgatctcttgttttagttcaggagaatagtaacaattctttccttttttgacgaactctattccgtaacgatcaatcaatttaatcatgtacctaagattagaattgtttatcccaaatttatttgaaagcttctctaagctatatccttgttttctaagttcatagatctgaactttatcatcataactcaatttcataataaaacaccccaaaagttagattttttctgtctaacttttggggtgcagtacaatcttgggtatcttttttcttatatgcttgttttataactcgggtgaatttcttagaaaatatcaaataacaatttcacattgagaattgttaagataatggaaacgatatagccaaggatggtattccatttggcattggtaaattctcccatcagtgatttcttagaagttagataaatcagtgggaagattgaaaatggaagagcaatcgaaagaaagacttgtgaataaaccaataactgatccaatgttttttcctgatgaccaaacagaaccgctacaatcatgacaggcaacaaggcaaagagacgagttgccaaacgaatgaaccattgaggtaatctcatatgcaagaaaccttccataacgatttgtccagtcaaggtacccgtaattgtcgaattttgaccactggctaataaagccaaggcaaacaaggttgataaggtcgagctagctatagctcctgcaatagtagaatcctgcaaggcattatacatttgagagaaggcagaaatctcagatgcatggccgaaaaagagagccgccccgagaattaatagaagggagttaaccacaaaggccaaggataattggagatttgaatcccaggtcataaagcgcacggcttttcgaacatcattcttgtccttgtgattgattttccgagtttgagacaaggaagaatgcaaatagaggttatggggcataaccgttgctcccacgatccctagtgccaaggttaattgactttcatgccctggcaagggactttcaaataaggttgcattcggtagataaccctcaacgattccttggaagcttggatgtgacaaagctaccagataggtaaaaattgctagaatggttaaaatcagtgttgtcacaatagcttcaatcttcttaaagccaaatttcatcagaagcaataagagaaaaacatccaacacggtcaagagaattgctatcataatcggaatcttaaagagaagattgagagcaatcgctgaacctagaacttctgccagatctgtcgccatcaaggctaattctaaaatcacccatagactataacgaagccatttaggtgaatgatgagccgttgcttgagccaggtccatctgggttacaataccaagctttcctgccatctgctgaagttgcatggcaatgagagatgaaatcaagataacaaacaagagactatacttataggaagcaccaccgactacactggtaatccagtttcctggatccatataaccaactgcgacaagagcacccggacctaaaaaggcatttaaattttgccagaaatgattgttatttggagtatcgatagattgattaatctcagagagtgacacttttttatgagaagacatagatacttacctctttctaaacctactttttcattattttctattagagaaaaataagattgactttaaactattaaaacaatgaaaactatatgaaaaacatttagttttttcattatttttcttaaggcaccttaatatttttcttaaggcaccttaatatttttcttaaggcaccttaattataacacaaaaaatgaaaactatatgaaaaacatttagttttttcattatttttcttaaggcaccttaattataacagaaaatatgataaaaacttaagaaaattcaggacttgatttaatatttaggatacaacaaaatgttgtattctttttttgcaaaagaataccaaagaataaaataaaaaacgttgtaaaaacaacgttttagaaagatttacaaaacaatgtaaattatcaatggagccggtgggagtcgaacccacgtccaaacatctgctaacatatttgtctacaaccataggttatgtattcgtttaacagtccctcgacacataactcaagcctagaaaccgcgagtctatcaatctcttatcaagccgctagacaaggcttgatcgtatctcgctaataataagacctgtcattgaacacgagcaatccaaatcgggtcacgcctgctggtttttaggcagctagagcgtaagaagtgttattttttgcagttatatttaactgagcgtttacgtcgccacacgagtcgcaaaatatgcctcataatgcctgtcgaatccgtaacgaccccaaaagacaataaaaccattataccttatctaactcaaaaatgcaaaaaggaaagcaattaactacaaaagatagtctttcaaagattttgtcaaaacctgataaccgggaacactaaggtgcaacccatcagttgtataatcttttttgagttggcctgcctggtctgtcaaactatcaaaaactggcgcaaattctacctgcatataggcagaggaaagttctttataggcttgattccatttctgaattttttcattcgtgcggatatagactgtctgcttgtactcctcgccctcattgactggcaaaatggaaagcaattttatctctgtcagtggataatcgcgagcaatggattgtatgatagattcgagattattgagagcctcattcacaggcacatcttttccgatatcgttcgtcccaattaaaaggacaattttatctaccgccccaccgtacagatgcgcatccagattctctaataacagccctgtctgataacctcgaatgcctcgattgacaatcgtctttgcagtcccaaatagttcctgcagaggataatattcgacaatggaatccccaataaaaagaatgtctggctctacaacagaaacctgatttaagtgacgatacttggtttggattttttcttgttcctttaggagccaattttctaataactgtactgccacttcattctcctttttctaaccagttctccaagacttgataaactcctccttggctattggctggcgctagagcagtcgccacagctttggctttatcatcagcattttccatcgcataggcaattccagccatttcaagcatttcaacatcattttcactgtcaccaaaagccatgatttgttgggaggtcaagtcccagcgcttgagtaattcttccaagccccatgctttatgaattccagcttgaaggatatcaatgcaaccatagccactcgatacagcacgaacacggccatcaaagaggtcattgatttcttccaagaccgaactcaaacgttcctcaccaacaaccatactcatcttgagcacaccaccaaagaggtcagaggttaattcgtccacaaattgcatccgttggtagaatttttcaatcatttctggagtcataaaactttcaaggtctgtaaaaatcgtaccttctttgacgaaaccacccttcatagacgttacaacaaactgatcctgacacgctcgacccttaaaatgagccaaagccttatcgacaatggcatcatcccaagtctgagcctgaatcagttcattgttttcaaaaatacgagcaccgtttgcaacaaccagaaccacccgatcgaccaagtgctccagtagttgcctcatgcggtgaatttcattcccagtcgcaatgacaaaacgaataccccttttatccaactgatctaaaatcttttccaaacgtgggagatcaagctggcctctagcatccagcaaggtcccatccatatctgttgcaattaccttaatcgtcatttactttcctctggattcaagctagtcccacttcaatcccacatgttcgttcatttctttgtaggctgtatcaattcgttccttagtcgcttcatctaactggtcacgatgactaccaccctcgataaaatcttctaagatataagtttggtataggaatagtggataaccttctggagaataggttccttttggtgtacggtttacccaagaaggatgcgcttttgcagtttcgattgtcgtcttaccggcttttttcttaatagtcacatccatgagcacgccgcgctctgtccacttagcattctcttcatcttgcatggtttcaattcgttgattggaaatgaagttccccattgaatagataatgagtttcttgtccccatctttttcaaccgtttcagatggttcaactacgtgagggtgccctccaaagataatatccgctccccaatcgatcatcttgtgataaagagccttttgttcttcagttggttccaagcgatactccacacccatctgaggcatgataatggtgatatctgcttccttctctgctcgttcaatttcagccttcatcttgtcttcatttaggtctgaaagatagcggttatagtcttcttgagaaatactttgctcaattccattaaaaccataagaataggctaaaagtgcaaccttgatgccgttcacttccttgataaccagtggagcttgatcacgtgactcatgcgtatacactccaataggtgtcattcctgccttctcaatagcatctgctgttgaaaccacaccttctatttgtgaatctaggatatggttatgcgccaagtctagcacttgataaccggcatccttgatggcatccataacttcaccaggtgcattaaataggggataacctgccaaatagtggtccttgttcacagtaccttcaaaatcacctataattaggtctgcttgtttgagccatggtttcacataatcaaaattctcatgaaaatcataggtcccatcttcttttaaagccgaacgataaataggaatatgataaaggaggtccccattggccataattctagcagttttttcctcttcctgatctttagtattttgattggtcttatttgcttcttgagaaatggcatcctttttttgactggttaaggggattccttggaagctttcaaacaacaagaccaagcccattgataaagcaactgctagcaagagtatcgccacaaatcccttattgctccacttgcgataactcctaaaaaagtttacaaagcctctcacaaaatgaaaaactggtccacgtttatgtctatcttgtcttctttgcatcttcattctccctactttctaatgcaagccttttctttttattatatcacagataagtatttctttcacaattgaattgaacttcctatctattttctataaatcctaaaggctgtaatactttcaatccttgtcattttgtgatatcatgtagaggtaatgaaaggagagaaaatgtctgcaatagaacgtattacaaaagctgctcacttaattgatatgaaagatattatccgcgagggaaatccaactctacgcgcggttgctgaggaagtcactttccccttgtctgaccaggaaatcattctcggtgaaaagatgatgcaattcctcaaacattcccaagatcctgtcatggctgaaaagatggggctccgaggtggtgttggacttgctgctcctcaattagatatctcaaaacgtattatcgctgttttggtaccaaacattgttgaagaaggtgaaactccgcaggaagcctacgacttacaagccattatgtacaatccaaaaatcgtctctcactctgttcaagacgctgctcttggcgaaggagaaggttgcctctctgttgaccgcaatgtgcctggctatgttgttcgccatgctcgcgttactgttgactactttgacaaggacggcgaaaaacaccgtatcaagctcaaaggctacaactccatcgttgttcagcatgaaattgaccacatcaacggaatcatgttttacgatcgtatcaatgaaaaagacccatttgaagttaaagatggtctactgattcttgaataaataaaatcccgttgcaagacggggttttgtgttataatagaggcatgaaaacaaatgatattgtctatggcgtccacgccgttaccgaagccctccttgcaaacacagggaacaaactttacctccaagaagatctccgaggtaagaatgttgagaaagtcaaggaactggctacagaaaaaaaagtatccatttcttggacttcaaaaaaatccctctctgagatgactgaaggtgctgtccaccaaggtttcgttctacgagtatccgaatttgcctatagcgaactggaccaaatccttgccaaaacacgccaagaagaaaatccacttctattgattctggatgggttaactgaccctcataatctaggttccatcttgagaacagctgatgcgaccaacgtttcaggtgtcatcattcccaagcaccgtgctgtcggagttactcctgtcgttgccaaaacggccacaggtgctattgaacacgttccaattgcccgcgtaaccaatctgagccaaactctagacaaactcaagggtgaaggcttctggacctttggaacagatatgaacggtactccttgccataagtggaatacaaaaggaaaaatcgccctcatcatcggaaatgaaggaaaaggcatctctaccaacatcaaaaaacaggtcgatgaaatgattactattcccatgaatggacatgttcaaagccttaatgccagtgttgctgcagccattctcatgtacgaagttttccgaaatagactataaaaaaagtttccagtcatctgattggaaacttttttatgattaactatgttctgtaataaacttgtaagcttcttgacctgcgatagcgccatctccaactgctgttgtcacttggcgaaggtctttcaagcgaacatctccaactgcgaagataccatcaactgcagttttcatgtggttgtctgtcacaatccagccagcctgatcttgaatattcaattctttaacaaaatcgctaagagggtctaatccaacatagataaagacgccaccgaaggcttgctctgtcacttgacctgttttcacattttcaaagacgacagattctactcggttttctcccttgatttccttcactacagaatcccagataaagctgattttctcattcgcaaaggcgcggtcttgtaaaaccttttgggcacgaagttggtcacgacggtgaacaatggtaacagtcttagcaaaacgagtcaagaagagggcttcttcgacagctgaatctccgccaccaactaccaacaaatcttggtcacggaagaaagcaccatcacacacggcacagtaagaaacaccacgactgttcagttcttcttctccaggtactcccaaaggacggtgtttagagccagtcgctacgataacggtacgagtttcatatgtttggtcatcagtcatcactttcttaaaatcaccatggtcttcgacattttcaacataaccataaatgtgctcaacaccaagattttcaagcggttcaaacatcttttctgccaattctggcccactaatattagcgtatccagggtaattttcaatatcagatgtattattcatctgaccacctggcagaccaccttcaatcaaggctactttcagattgcttcgagcagcatacaaggctgcagtcatacctgcaggtccagcaccgataataatagtatcgtacatatagtttccttctttcttgttgtaactatctttattctaactctttcttgtcaatcacgcaaggattatgccttgaaaacaagaattaaactcataaccgcaaaggataatactggaacaaccaaaacaccaatcataatcatatcatagagatgggcttggcgagccttggctgtcttatcaactcccgacatggctctcagtccaatccaaatccctaaaaaaatcaggacgaggatggtggtcaagatcaaactctcgaaatataaagaaaatagttgcagtagcatgatttctctcatttctatcttttttaaagagtaaactcagctagtccagctaactgagtttttctttatctattatatcaaatataagtccgtttgtaactagcgaagaattcttttgttcgctcttctttaggatggtggataatctcatccggtgttccagactcaatgattttccccttatctaggaagagaatcttatccgcaacttgagctacaaaggacatgtcatgactaaccaaaatcatggtttgacctgacttagcagcatctgcaatagacttttctacttcgccgaccaattctggatcaagggctgaagttggttcgtctaagagcaagacatctggtttcatcgcaagtgcacgcgctagggcaacccgttgcttctgtccacctgataaatggcgaggataatggttttcacggtctgaaagcccaaccttagccaactcttccttggcaatcttggttgcttcttggtcggataatttcttgacaacaaccaagccttctttcacattatcaagtgctgttcggcgttcaaacaaattaaactgttggaaaaccatagacaacttacggcgtagggcaaggatttcttcttgagtgattttagaaaaatcaactgagaaatcatcaatctgaatagagccactgtcaggtgtttcaagataattgagactacgaaggaaggttgattttccagctcctgaagaaccaatcaaggctacaacttcccctttttgaatatccaagttcagatgatccaagacagtctgtcctgaaaaggatttgcttaaattcgaaatcttaatcattaacgaaggtctcctttcacatctgtttgcactgtatcgggtgcagaaatagccatttttctctcgatgaaacgaccaaggctttcaattccgatattgactacccaataaacaagggcaacggagataaagcgttcaaagtagcggtaatcagctccacccaaaatctgagcttgggcaaagacttccacaacacccgcactaaaggctagagaagttcctttggtcaagccgattagggaattgattaaggttggagtcgccacaacggccgcatttggaataatcacgcgacgataaacttgcgctcgggtcatccccagactgcgtgccgcctcaatctcaccaggattgactgagagaatggctgcacgaatggtttcactagcataagctgcttcattaaaggcaaaggcgacaattgcaaaagcagcggctggaatcgcattgatattgaaaccagttccccattgctgattgagagctttcaaagccaaaggaattccgtagtaggtcaacatgagttgcaccaaaatcggtgtcccttttaagaagctaacaaagaaggcctgcaaggggtataaaattttgacacgattgatcttcacaatggcaaaaagaagcgccaaaaccaagccaaaaagagcaccaccaatggtcaacataatcgttattggaagttgttggacaattctcgggattccatcaaagaccgaacgcaagctaaaaagcttgccatccggaatcaattgcatcaagttttggtaccaatctgatgctaaaatcgttgtaacattcataaaaacatcctctcctgataatgattcattctaccatacttttgccgtcaatgaaattatttgctacggtcaggtacagactttgtctacctactagtttatcatactttgaaacagggaggttatatattttatctatcaaagagatagataaaaactatttcaatcccaattcttcataagcttttcgataaccgatttgcttaacagttccattttctactaaaatggggcgttttaacaacataccgtcgcttgctagcaactcagctgcttcttggtttgacagacttcctaccttatctttcagccccaattcacggtatttgatcccactggtgttgaaaaattgcttcaactcaaaacccgaggtttctagccagtttaaaatgacttcttggctaggtgtttcttcaacgatatggatggctttatagtccacaccgagttggtttaattcttgttttgcttttttacaagttgaacattttggatattcgataaattctaacatgtctttcactttctattttatatctttaaaatctgcgccttcatgctccaagagccaagctttcttttccactcctgcagcataacctgtcagacgcttgccagctcccagcacccgatgacaaggtactaggatagaccacggattgcgtcctatcgctccaccaattgcttgagcagaagccacttgtagctcttgggctatttgtccataggtcactgtctgaccataaggaattccctgtagataggaccaaactcgcttttcaaaatccgttccgattggagccaagggcaagtcggataaatcctgagacttgcctttaaagtaatcatctaagcaagcaataactggatctaaaattggatgactaacaactgcttctatcgtctcatctcctagtcctctctcaaaatgcttctgctcctgcacccaaatgccatacagatattgctcgtcggcaaccaaagacaaggttcctattggcgaaaagtagagcatttttacgtacatcttttgcattatttctttaatttttgataggccaagcgttcgccatcaacaggcactttaccaacctgtttaaaaccaagtttttcaaaaatatgctgcatgaccttgtttgcaacatgcgtatctgagcgaaaatctagatagtcaaaaccttcaatcaagccctctaagaaggtttgagcaacgccctgtccctgtacatctgctgccacagcaatacggtgaaagactaggtactctgactccccagcttgccagtttccttcataaatggcttcataggctgcctctggactcttggtcacagctgcataagctagtaattctccctcttccaaggctacataggcttgacctgagataatatcctcaataataatatcagcatttggataaccattttgccactggtcactaccagcatctgctaaacattttttagcatcctccatcacctgcatgatggtatctacttcatttggaaaagctaaacgaatttccatcttttctcctcatttctgactagtttctcccatcatagcataatttaagtctttctacaagcagttaaaacttgactttctatttctattattttataatctagttattaaaactagataaaaaggagttgaaaatgaaaactaccttttcctacccaaaatgggcagaaatcccaaatattgacctctatctggaccaggttttgctctatgtcaatcaggtctgctcccctatctctcctgataaagacaagggcctgacagcatccatggtcaacaattatgtgaaacatggttacctaacaaagcctgacaagaaaaaataccaacgccaacagattgcccgtctgattgctatcacaaccctcaagtcggtattctctattcaagaaatagctcagacacttaatactctccaaactcaagcaagttcagaccaactctacgatgcttttgtggactacatgaaccaaggaattgacccagctaaccccattatccaaaccagctgccaaaccgttaaactctatcatcaaaccctagccttaatcgatcatactcaagaggaggtaatccaatgaacactagtcttaaactcagcaaacaactcagtttcggagaagagattgctaatagtgtgacccatgccgtaggtgcagtcatcatgctcatcttactgcctatttcatcaacctatagttatgagacacacggatttttatcctctatcggcgtttccattttcgttattagtctctttctcatgttcctatcatccaccatttatcactctatggcctatggttcgacccacaaatatgtcttgcgaatcattgaccattctatgatttatgttgctattgctggctcttatacacctgtcgtactgactttgatgaataactggtttggctatctgattattgctatccagtggggaacgaccatctttggtattctctataaaatctttgctaaaaaagtcaatgagaaatttagccttgcactttacctgattatgggctggttggttctagctatcattcctgccattatcagtcaaacgacaccaattttctggagtctcatggtaactggcggactatgttatacagttggagctggattttacgccaagaagaaaccttatttccacatgatttggcatctttttatcctagttgcgtctgccctccaatacattgccattgtttattacatgtaaaaaagttgagaaattcaatctcaacttttttctttacacatattgataaagtactggtgcaagcgcacatcatcagtcaattctggatgaaaagaagttacaaacatatttttttcttgggctgcaacgatttgattatcaactgttgctagaatttctacaccctctccaacactagtgataattggaccacgaataaaggtcattggaatctgaccgactcccttacattctgcttccgtatagaaacttcctagttggcgcccataggcattgcgctcgaccaccatatccatagttcctagatgactctcttcctgagaagtaatttctttagccagcaaaatcaagcctgcacaggttccaaaggctggtaaaccagatagaatggcttctcgaatgggaatcagcatgtcctgctcacgtaagagcttgcccatggttgtagattccccaccaggtaatatcaaacccgacaaatcactctgatgtttctgaaaatcttctaaatttctgatttcaacactctcgacacctaatcgatctagcacttttgcatgttctgcaaaggccccttgcaaggccaatattccgattttcatctattttcctcgctctgccatgagaatttgaatttcattttcattaataccaaccatggcttcgcctagatcttcagagatttgagctaggatttgaggattacggaagttagttaccgctttgacaatggcactcgctcgtttaacaggatctcctgacttgaaaatacctgaaccgacaaagacaccctctgcccctaattgcatcatcaacgcagcatctgctggcgttgcaacgcctccagccgcaaagtttacaactggcaattttccatgttcatggacgtattgaaccaattctacaggtacctgcaagtccttagcagcaacataaagttcgtcctctcgtaagttttgaatacggcgaatttcctgattcatcatacgcatatgacgaacagcttggacgatatcccccgtacccggttctcctttggtacgaatcatagaagcaccttcagcgatacgacgcaaggcttcccccaaatccttagccccacagacaaaaggaacttggaattcttttttgtccacatggaaacggtcgtctgctggagataaaacttcactctcatcgatatagtcaatctcaatagcctctaaaatctgagcttcaacaaaatgcccgattctgaccttggccattactggaatactaaccgcttcttggatttccttaatcatctttggatcactcatacgggaaacaccaccagctgcacggatatcagctggaatccgctccaaggccataacagcagccgcaccagcagcttctgcaatgcgggcctgttcaggattctgaacgtccatgataaccccacctttgagcatctgtgccaagtttttatttagttcataacgattttcagtcatttattttatcctcattatttatattggtagctaccatttcattttaagttagattaaaatgaagtacaagataaaaaaaacgtaattgtgtgggtacagattggctaaaaaaactatctgaccttagcttaaggccagatagttcatcaaattttatttttcagctgtaagggcagccattgtgatgtagttatatggtttgttgaagtgtggcaagaagaataggtctgtcaatgccaatttatcaattgtcacatgttcttggatagcaagtgagaacatgtggattcccatgctgattgcagaatcgcgtgaaaccatttgtgcaccaagaatttcacggctatctttgtcaaagacaatcttgatggctacttcatggttatcatgtttcatgaattctggtttttgaagatcgttaaagcctgtttcagttgcattgtaaccagcagctttagctttttcaagagtcaaaccagttgaaaccatgtgaagaccgtagattgagataccgtttgatccttgaacaccgattccttccaattcatgtccacatgcgttatatgcaccaacgataccagtacgaacagcgtttgaagcaagcgcaatgtagctagtgtctttacgagcgttgtcataaacagtcgcacagtcacctactgcgtaaacgcctgggatagatgtttcttgttttttgtctacaaggaaggcaccgttacggaatagttcaatttttccatcagcaagggctgtgtttggacggaaaccaactgcaaggataaccatatccacatcaaaagtttctttatcagtaatcaagcgttcaactttaccgtcaccctcgattgctttaacagtttgaccaagcgccaagcggatgttgtggtcttccaagttcttcgccatcatttgtgtgaagtctttgtcatagtaaccgttcaaaacagtatcaacgatatcaacaaggacaacttcttttccaagacgttcaaaggcttcagcaagttcaacaccgatataaccaccaccaacaacggcgattcggtcaaggtgttgactcttatcagacaatttgtgaatcacttcttcagcgttttggtacaatttcacaaattgtacgttttcaagagttgctttaaattcacggtttcctttaacaatttcaacaccttcgattggtggcaagattggtgtagaacctgtagcgaaaatcaatttttcatatgattctttgtgctcttttccttcaacttccgctgtaactactttgttatcatagtctattgaaagaactggtgaattcatgtataccttagcacctttagcttccaatttttctttatcagaatagaacaagccttcagcaccgtcaatttgttcaccaatccagagggccattccacatcctaggaaagaaatgttagagttttggtcaaatacaacgatttcgttctcatttccaaagttatccaacatagtgttaatacatgctgtaccagcgtggttagcaccaactacaacgattttactcatagaaaaattcctaccttcaattttaaatttacccctctagtataacatttactgttagcgtttacaagagttttgctaattttcccgttttttttgtaaaaaatgtaaataatctgtattttatcagtctttcttacaattactctttattttctgagcatatttcttgacaagtttacaaattttatttgtgaaaacgctgactttatggtatgctagtatcatgaaaagaaaatgtaaggggttaaacttaatataaatttactatatttcagtcttcttttcataaaagaaaggagttggtagcttgcctcttagttcacattccgaacggctaatggggactactatcactatttcattagtagatgagcgagccgatagcttgatccagaaatcctttgatttactcagagagcttgaataccgcttcaatgccaatagtcaagaatctgagttgatggaaatcaattatcaagctggaatagctccagtcaaagttcatcctgatttgtttgaattgatttcacttggattagagcatagcctagcgccctctagtcatctcaacatcagcattggtcccttgattcaaacctggcgtatcggtttttcagatgccaaggtcgcccagcctcaagaaattgaatcggtgctacctttaatcaatcctcattatatcgagttagattcgtccacttccactgtgtttttaaaacaaaaaggaatgaagatcgatcttggttgtttagccaagggttatagtgcggataaagttgcccaatttctgagagaagagggagtaacatctgccttaatcaatctgggagggaatatcctgaccattggaaaaaatcaggcaagaggggatcacccttggcaaattgggattcaagacccagccaatcctaggggaaatcacttaatgaccatccctgttgtcaataaatctgtcgtgacttcaggcatttatgaacgtcacctgactgtcgatggaaaagattaccatcatatttttgacagccaaacaggatatcctgttgaaacggaactagctagtctaacaatcatctctgataaatcagttgatggtgaaatctggacaactcgtctatttggagaaagacctgcttctatcctctggcaagtcgaaagtttggagggcatcgaagctatcctcatcgataaggaaggtcacctaagctgttcttcaggaattccaactctatagaaatagatatttcaatggagttttaaaatcgtattatgtaaaaagagaaaggaaatctcatgttaaaacttattgctattgttggaacaaattcaaaacgttctacaaaccgccaattgcttcaatacatgcaaaaacattttgctgaaaaagctgaaattgaacttgttgaaattaaagacattcctgtcttcaataaaccagccgacaagcaagtacctgttgaaattttagaaattgctgctaaaattgaagaggcagatggcgttattatcggtactcctgagtacgaccactctatcccagctgttttgatgagcgctcttgcttggttgtcttatggtatttacccactcttgaacaaaccaatcatgattacaggtgcttcttacggtacgcttggttcatcacgtgctcaaatgcaacttcgccaaatcttaaacgcaccagaaatcaaagcaagtgtccttcctgatgaattcttgctttcacattctcttcaagcctttaatccaagtggagatctagtagatcttgatgttattaaaaaactggatgctacttttgacgacttccgtatctttgtaaaaattacagaaaaattgcgcaacgcacaagccttacttcgcaaagatgctgaagaatttgactgggaaaatttgtaagataggagaccaaaaagaatgaaatttgttggacttgtaggatcaaactacgatcaatcatataaccgtaaactcttggaattcatccgtcgtcacttcaaactcaaatttgaattagaagttctcgaaattgacgaagttccaatgtttaaccaagacgaaaaatgggatgaaagtttccaattgcgtctcttgtataacagaattactcgtgctgatggtgtcattatcgctactcctgagcacaaccacacaatctcagcttctcttaaatctgttcttgaatggctttcatacgaagttcatccatttgaaaacaaaccagtcatgattgtgggagcttcttactacgaccaaggtacttctcgtgcccaagttcaccttcgtaagattcttgacgctccaggtgtcaatgcctacacacttccaggaaatgaattccttcttggtaaagccaaagaagcatttgacgcagagggcaatatcacaaatgaaggaactattaatttccttgaaacatgcttggacaactttgtaaaatatgtgggagtcgtttcaaaattgaaaaaaccaaaaccaattgcaccagaagatttatattgtacaaattcaattgcaactaccattcaaggtgttgatccagacgatcctgaatgggtagaaaaagcagctgaacttgttggagctgtttctggagatacttacgttaaattagaccatggtatcttgacagttaaccaaattgacatgttcttgaaagcaatgccatttgagttgacatttgcagatgataataaccagttcttgtactttaataacgcacaccaagatccaaatacaatgtttggtaaacgtgtacgtgctcaatcaggaaaccgtttaggaactgtacacggttcattgccagattctcgaatgaaaaacgttgaatgggttgttggcgtactgcgtaacggggatcaagaatatgtccgtacaattgtgccaggaacaccagaaggcgttattaatacccataattaccaagcaatgtactatccagatggttcatatgctggaatcaatgaaatcatctttaatttccaaccatggcttgactggtacctcaatacaactggtcaacgtctagttggtggaaatgctgcagctcctgccggaggccacggtggcgcagatgccacatctggagcttctgatgcaggtgatgctggaggtcacggtggtggcgcagacgctacatctggcgcaagtaactaataatagttctgggaaccatattggttccttttttagcgaaaaaagactagcagacaaaaactgctagtcttttggtattatttcatctatctttgttaaaagaaagaatatttatactcaatgaaaatcaaagagcaaactaggaagctagccgcaggctgtacttgagtacggcaaggtgaagctgacgtggtttgaagagattttcgaagagtattattatgaatttggatcatcgagactacgaccatgtaaccctttttcacgttgaacttgacgtagtttctctggtgtaacatcgtttccttcttcgtccacaattttgatcccttcgatgtggtgacgaacagtgcgacggtacccttcgatgtactcctcacgtagtttggcttgttcaactttttcttctggtgtcaagccttctgtttttttctttttggcaagctcgttaatacgatcaatttttttaggatccatgtttctctcctttgtgataagataaagtccgtttatcaaattttatttagtgttaatttggttaaaacgagcaagcttagctgctttttgagttaaatgagacaagattgccaaacgattttgacggacagcctgatcttcggccataaccatagtattttcaaagaaagaatcaataactgggctaagagcaaaaagttgtttcaattgctgactggcagtacctgataaaacgagtgattctactgcttctgccaaggctttttcttggtcattttcaaagagtgctgaatcaactgcaacaactccttctgccttatcagccaagttaaaggcacgagaaagtgattcaacagatggtttgaaatcttcttccttacttgcttctacaagagcacttgctgcttccaacatatccgccacaacaaagtttgaacctgcaagaacggcttcctttatatcttttggagtagaacccatcatcttatcaacacgagccttgataaaatccataacctctgccttattttcataagtcaagctatcaaatgttaaagcataaaggctatcgatcagctcatccatagcaatgtgccaaccaaaagcatccaagatacgaactacaccttgagttgcacgacgaagagcataagggtcattagaccctgatggaatcaaacctactgagaagaagctcaaaatcgtatccaatttgtctgcaatggcaagcactgcgccgaccttgctctctggaagttctccttcagctgaagtaggcatgtagtgttcacgaatagcagctgctaccgctggagtttccccagcaagaagggcatatttttcacccataattccttggagttcgtcaaactcaccaaccatacctgtcaacaagtcaaacttgtaaatggctgctgcacgggctaggtcaatcgtttcatccgctgacaaaccagctttttctgccaagagaatagcaatctgaccagtacgaatcatgtgttcacgaagggaaccaattttctcatggaaggttacattgtttaatttttcaacaagatctgaaatcaccaatttttggtcttcacgccagaagaattctccgtcttccaagcgagctaccaagactttttcatttcctttgatgacattttccaaatgatctgcgtttccattacgaacagaaatgaagtttggcaagagtttaccatcttgatcacggacaacaaagtaccgttggtgttccttcatcgaagtcaccaaaacttcttctggaacttcaaggtatttggcatcaaaacttcccataaaggcagttgggtattcaaccaagttcaagacttcattaagcaagtccgcatcaatttcgatatgtacaccatgctcagtttcgattgctttgatttggtcaacaatcatttgctcacgttcacgaggatccgcgattacaaactgcttacgaaggtcttcttcgtagctcaatgctgactgaatcttagtttcttgtcccaagaaacgatgaccacggctcacacgatcacccttaatatcaagaaaatccaagtcaaactcttcttcatctaaaagaacagttaaagtgtgaacagggcggatgtattcaaaggtgttgttagcccaatgcatgctgacagggaaagtcaaggacttcaagacatctacaacaccaggaacaatggcttcaactgcttgaccaatttcttccttggtaacatagacatattcttcacccttgatttcacggaattcgatatcttcaacagtcaatccttttccacgaacaaatccttgagctgctttggtgaagtttccatcactatccaaggcaattttctttgctggccccttaaaatcttctgtcaaatcagcctgtttgtctgcaagaccagttacacgaacagccaaacgacgtggtgttgagaaggtctgaatagcttcaaaagacaggcggttttccttgaggaaggctgccattttttcgccaagttgtttttcacttggtgtgacaacataggctggtaattcttcaagaccgagttctactaataagttttttgtcatgttttttcctttacattttcttcaatcttttttgatatgcaccttaggtactggggacgtcgctaactaactttgtgagtctgtatggaaatctaatactaaattgatcaagatttccaacagtctcatcaaagtggatttagctgactaatttttgaacctaaggtttcaaaaatccccacataacagtacggcggtgcatatccctctagcaagtcttcgacttgcctctaacgattttagagcacaatattactcactattctgcgtcttctgctaagagtttagctcgtgttgcttcatccaaaagtgggtagcctaggcgttttcgttctgcgacaaaggttttagctacgacacgggccaagttacggatacgagcgatatagcctgcgcgctctgttacagataccgcaccacgcgcatcaagtaggttaaaggtatgtgaacatttgagaacatagtcataggcagggtgcaccaatccttcttccaaggcacgaccagcttctttttcaaacttatcaaagttttccaacaacatttcttgatcagaaatttcaaatgaatattttgagtgctcgtactcaggctggatgaagatttctccgtattttacaccatcagcccactcgatatcatagacagagtctacttcctggatgtaagaagccaaacgctccaaaccataggtaacttccgcagtcacagggccagttgccaatccaccaacttgttggaaataagtgaactgagtgatttccataccgtcaagccaaacttcccaaccaagaccagctgaaccagttgatgggttttcccagttatcctcaacaaaacggatgtcgtgctccaaaggattgattcccaatttttccaaagactcaaggtaaagttcttggatgtttgatggagatggcttcatgaccacctggaattggtggtgttggtaaagacggttaggattttctccgtaacgaccgtcagcaggacgacgtgatggctctacataagccgcattccatggctcaggtccgatagcgcgaaggaaagtgtaaggactcattgttcccgcacctttttcattatcataagcctgcataagcatacaaccttggtcattccaaaattgttgcaaagtcaaaataatttcttgaaatgttaatttcttagacattgaatactcctttaatttatattatcttcttagatttatttttcaagcaaccaagaaaaggctgggtcctgaaaaatatgacgtttaggaacagtttgtaaattctgatcgctttcatctattgtacctaatttcaaagcacagacttctggtatattttcttgaacagtgaaaatttgactatgacagttctggcagtaataacgctgttttcctggagaagaactataggaaacaagcttttcttttccatgcaatactagcttttcactgctaactttagcattaactgtataggcagacgcagttgctttccgacaaaatgagcaatgacaaaaaactaattccgataattcctcatctagagtgtaggtcactgctttacataaacaagatcctttaagcattatgctcctttctacttaggcattagacgaattcaaaaagaaccgaatttcaacacccaagccttgcgactaggggcgtcagaaacgcggttccaccctaatttattacttcatttgtttttaaaaatattacagaaagcgccagttctttattttgccctacttggctcccactatcccaagttcgcttgaagaacgccataagactttctttcctgctgactattatatcaaaaattagcacaatgtacaattctttttatgattttctagaaatccatatcatcaactcgtggagcaccagactgaacaacaattgtttttaaggtttcacattccttatgactcagttcaattccaaagcaatcaagattagcctgaatacgagaagctgtgacagattttggaagtggtaaaaatccttctgctaagctccaggccaaggctatctgagcaaccgatttaccgtgatttaacgcgatttcttgcacttgcttgctatcaaacagttctccctgaccaaaagggccccaagcttccaataagattcctttttctcgacagtaatctacgacttcctcttgatacacacctggagccaaacgaacttgattgaccgctggaagaatttttgctgtttcaagcaaggcatccaaatgatggggaaggaaattactaacaccgatagcacggattttgccttcttgatagatgtcttccatcgctctccaaacttctgaatttcggattttccagtggttattttctctgagcggttttggatttggccaatgaatcaaatacaaatccaaatattccaagcccagcttctctaaagactcttcaaaagcctgacgagcttgctcatagctatgatttgtattccagagtttgctggttacaaaaatttcctcacgcagaactccactatcttgaatggcacgaccaacgctttcttcatttttataaatagctgccgtatcgatatggcgatagcctgcctttaaagcctctagtacagcttgatatgcaatctctccattttcagctttccaggttccaaatcccagtactggaattgtaacaccattgtttaaagtataagatttcattatttttcctttctatgagaagaaaatccaaagagccaaattttcaaggaaaacttttctctttagattttgtgtattattgattgcggtcgtaatagatctgatgagctttaagacgagagtctaacaaatctggaattgtcacaaagtcataaccctgacctttcaaatagtcaatgaccttgggtaaagcattcactgtctcaacatggatatcatgcatgagaataatagaaccattcttgacttcacgctgaatttctgtcaaaatagatgcttcatttttactcttccagtccagactatctacatcccacataataaagctcaaatcgagactattgcgaatgtcatctgtaatagccccataaggtggacgcataagtttagaactagaacccagcaccttagttagcgcatcctcagtatcagtaatttgttttttagcttcatcaagggaaagttttgaaagcactggatgactccaactatggtttccaatgacatgtccatccgatttcatgcgtttcaaaatctcttcatttccagaaacattcttacctagcacaaagaaagttgccttgataccatacttggaaagagtatctaatgcttgatttgtcgttgcaggatttggtccatcatcaaaagtcagggccactactttacgatttttcttttcataataagccttatatagctctgcatccttatctaataaataagaggactgaataacttcaaagaaactagatactggcaaggcaatctcgtctagattttcaactgactgacttggataaaggataatctgactatccttgtaatcaaaattccatgcagacaagtcttggtcagagaaacctttaacaacttgatcaatcttttcttgctccaatttcttatcctgtaaaaaagaagtcagttcttttatcagtttctctttggccttactagcatctgaaaataattgatcaagtgtaaaaggtttaccatcttctgtcaaatgtacttttgccagactagttttttcagtctcttcaacttttgaagaagttaaatcatagacttgtttcaccacacttcggttgacaatcccttttaaagttgaatcctgtttctccgtataataaaaaaccagattttccttatcctctagattgtctttaatatcctgtgtcatgattccctttatagacgaaatcacttgctccccttggagaggataataggcaattacttcggcttgtcccttacgaaaatgatctttctgatttccctcactcaattgattatctttatcattttttaaagactcaattttttgttcgaaactttgctttgtatatactttgtatccaatcattgaaccaaggacacaaatacttaccgaaaagatagctaccagggctattaaaccgattctctttttatcgtgctcaacacgttttgctctacttttatccatagagatatcatatcaaattcaggctataatttcaattattttagaggaaatagtatattaaaaagaggggaactccctcttaaaatcttattttactgcttctttcaaagcatctaccttgtccaaacgttcccatggaaggtcaatatctgtacgtcccatgtgtccataagccgctgtttgacggtaaattggacgcttgaggtccagcatttggataattcctgcagggcgaaggtcaaagatttgacgggctgctttttcaagcttgctttcggctactgttcctgtaccaaaggtatcgatacgaacagagacaggctgcgcaacaccgatggcataggccaattgcacttctgctttcttagcaaggcctgctgcaacgatattcttggcaatataacgagccgcataagaggctgaacggtccaccttagtcgcatctttaccagagaaggcaccaccaccgtgacgagagtagccaccataagtatctacgatgatcttacgaccagtcaaacctgagtccccttgcggtccaccgattacaaaacgaccagtaggattgatgaagaatttggtttgctcatccaagtaagaggctggaataacctctttgataaccttattaatgacatcattgtgaatttgttcgttgctgacttctggatcgtgctgagttgaaataacaactgtgtccacacgtactggacggtcattttcatcatactcaaccgtaacttgtgatttagcatctgggcgaagatagctaatttccccagacttacgaagttctgccagacgacgaaccaatttatgactgagtgaaattggcaaaggcatgagctcttctgtttcatccactgcaaagccaaacatgagaccttggtctccagcaccaattaagtccagcggatcttgatctgcatttccacgaacctccaaggcttcgttaacaccttgggcaatgtcaggagattgttccaccaaagatggatgtactcctacagtctcagcagaaaaaccatattctgtattagtgtagccaatctctgcaatggtatcacgaaccacacggttaatatccacataagcatttgtagatatttcaccaaaaacatggactgaaccagtatatacagctgtctcagcagcaacgtgcgcctctggatctttagctaaaatagcatccaaaatcgcatccgaaatttggtctgcaatcttatctggatgcccctcagatacagattcagacgtgaataatttacgttctgacataaaaatgtccccccttaaaaatagtgttatagagttacaaagtactgataggtattttcattttctaagagttacaacgcgtaagaaataaaaacgatacttttttatttctgaagctagtaaggcgcatagggtgaccgcattatagcggcaaccgtagaatgacgaacgacttttgagccgtcattctttgcgagttgcgactcgaaagaaaaaatagaaatttctaccatcttatcgggactatataactttaccattataccatttttaaactcaatttgcagtctataatgtagtgtttctgtatagatagttcgttctcataaaacaaaaaggatttaatcctgttatatacagaattaaatcaaaatctgaattgtttttaaattttttatactctctaaaaacacctctataatacatactcagacctaatatagcaataaatttatgaataatagtatttgatttgaataaaatgttaatgactatcccagtcattataaaactaattgcaattatcaaacgctgcttcatttgtacctcaactttctatttcgtagaaaaaaattcagttcctatccaaaagcctataatagctccaccatatccccttaaagaaacaatcccttctcaaaacatgagagttcaccttcaatgctggatagcattgcttcatccattacttcaaattgtttcacctttgtattcatcacgaatatttccttacatttatattaattttttatcttgttacaaatttggtaagttttttctgctcatttttccttatctcgttataccaaaagaaattaatccttgagctagatttttactcaattctccatatgtggcaatttctttataaaatgtcgcaacctttgggctcaatgatttctgactatgaatcccactaacagcctgctgacgaagagcttctgccaactccatgacaactctctgttcattttttgtattctctaatagagttttataacgtaataaaatatctcgttcatttttatgaatctctgtatctaaaatcaaattgtaaaccttattgagaatttcttctgttctcttatccataaattatcctctataacctgaaagacaatagctcctacccaatgatgatatccaaccattagccatgacatctttagttaactcaaaatcacacttagttacaatatccccattctcaatttggaaattaacagatgaaacattgtccaaacatgtaatgaggcgaaaaagtatcgtcatcacaaccttataaaattcccttttggtttattccttttaaacctatacaaattaatagtagagtggctatgatatcaacaatatcttgtgactttagtaaagacaagactcctagagaaataatgtaaaatatactaattacttttctcgttataaacaaaaactacctgccgctagcccgcctgttgaaatcgcaaatgcaacaccaacaagaccagtaaatgcagttagacctatataaattgacataccaactcatactccacaagtgggatttaatccaccagagtactcttgtaaatcactgttttttagaattgaaaactgactcattgaactattcattgtacatcctctctttttagcaaactcgcatagctgtatcaccacctagaatcgcagcaccagcaggtccagcgtataaaaagcctatctcagtcatccctgccctacctgaaatacatgccaaatcatttttacctccttcaacacaataatagaaagagcatcagctttgaacacattaacttgttctattgtttttgtatccatgatgaatatctcgtatataatagaaatcttttgtcagattataaccttgacaagttcagtatagcaaaacaaaatcgatttttatcacaaagtatttacatgttgctaactccacttatcttcaaatttaaatagacacattatcggagttatcaaaaagtcttgaaaaagtccagaatgattataatctgattaccaaaaatatgatttagacataattagttaatatcattctgcattactagtttaatttgatacagtgcaaatcgaaaaattattagcaataataaaaagccatttccaaaaaacaagaaatacattgctaaatcactctttaaatagtatagaaaccaaataagcatccaaagtatgctcatttttataaagatattacttactatccattcaatctttagcaagagataattaactatgttcattataacaatctccatatttccatcctcatcatatctatagctcaatcactttactactatgtctcaaaataatttattattatatactataagtaaaacgctaactcattctttttttgaaatatgtaattcgatattattcgagcaaataatgtatactactgtaaataacactacaaatatatgagtataaaataatacagatgacgacttataaccatctataacgacaaaaataattgataatagtaacagaaaaaatgtaggtgctaaaatctttttaataaattgcttgtatcgattaaagcatagttcaaaactaatgtttcctctcttcttattatgcgttaataagtgaatcagcaactcaaaaaacacactacctacagaaagaactaaaacttcgcttattggaacatttagaactattccaatcacacctattataaaaaaagatataaaaagagctaaaattagcctaaattcaccactttccatcaactaaccccttttctataaaaatctagcgatagcccatatagctgtgcaatattgtgctcataaaacacctccagcccaagttccagctcttggtgcaaccaaactaccaatcattgctcctgctaatgtgcaaacttcccctgcactagctgttcctccctcaatactagccaacatttcggtatccaaaacatcaaattgaatcgttgtctttgtttccatggggaatacctccatattaatttttattatttttgtcagattataaccttgacaagttcagtatagcagaacaacagagatttttaccgctaagtcttaaaatgtacgattttcatcacgaaacgtattttttcatgatttgtaacctttcaagattaaaaataaatcattttaaaatttattccacaaatcgctgctagatattgtgaagtcgtcactctagcttttttgcccagttttattgttatgactatttcctaactcatttacaggaactagctaaaaaataatgtatataaagtcataacaaaagaatcccccttaaaatattctatagaatattttaagggggattcttttaaagttctatttccaagatctgtgtaaagacataatttttacttgttgttttcaaacatacatttggataagattttaaaattctccgaacattggccaatcctataccccgacctacgccttttgaagaattgtcacgcttgaatatatctctcaattctatctctctttctaaagtagaattttttacaatcatgactaatttattccattctgtatcctcaaggaaacaaactgctattcctccttctgctgcggactctatagcattatctaacaagatagaagtaattgttaagaagtctatttgttccatattttttatagagaactgttcaccaatctccagggaaactggaacagataagttttgggcctccgataacttagataatagtaaactctttaacgccaaatcattgatatttcttagatgtgctacatcaaaacgcttgccttttaatttttcaccagaatttttcaaaacactatcataaacttgagaaaccagattaatatctttttgatctatacctatttttaagctcgataaaatattagcataatcatgtctaaagcttctaatttcttgatacagcccctcaacttgttgactataattactaagattttgcaattgaatttctttttgtagaacgactttctcctgtagttcttgaagtaatcttctatccaagagattaacaaaacaaataaacaataaaaagtaaactgctgtccataattctttataatccaacattctatcccaacttactttatcactgtagtttatataagatggtaagataaaataggctagcattaaaatatccgcagtaattaaaataaattttgtctttctatccaagttctttatttttaaatgactaaaattatatcgaaagagactaataagaaaaaacacaataatttcagctaataaagagaaaatcattgttcctagattagtttcatatagtctatacaatattggaatcttagaaattataaagtaacctaaaaaatttttgatgacatcccaaaatccaagtggaaataatgagtaaaaaagtaataaagaaaccttacttcttaatttaccaatagacaaagtatataggataaaaaaggtaggataaagcaataatgacccaagaaagtaaaatccagttgatttaaacaaaacaataaatagtaatgataaaagatggaacagaataatggacattactactttttttagatttaatctctcacctacaaccttagtatggatacataacaatagaaaaacacctataatatttagaaaaaatatcatctaaatctccttagtcatgaagtctttcgataactttcataagtggacgaatttttaatctagagacaatacaagaggacccgttctgaaaatgaactaaccgattttctttatcaattaaagatatattataaggatttacgataaatgatctatgacattgaaataaacgtggttcctgtttaagaatatctgacaattgtccataaaattcaactatgtctcgttttgaatagagagtcaacttatgagcaattgttgatgtttcaatatacaataaatctttaaaagggacttgaatttgagctttggatcctgtaaatataaaagagtcctcagatactgttattccttgattatcgctaacacttaaaataacattttcaattcgtttgataaataatggttcaggtaattctttatcaatgaaatcaatagctgatactaaatattcaaaagatacaggcataaactcagaatgagatgttacaaaagcaatcactgcttgagaatcaagttttctaatttctctagcaacgtctaatcctcttttgtcatcatcttttatttcaatatcaagtaaaaataattgatgatttcctctctctgaaatgtcctctaaaagctgttgaggttttccataaacctcaaaatgcctatactcaatcttattatccaccaaaatttttttgacaacattttcaattctagtctgttgtaaaaaattatcttctagtataaaaatattcactacttcactcctatatatttttccactgattttttaatattgtaaagtgtcttctagaacaagcgatgtctgatactctatcatccataaacataatcgttcttgtctcatgattaaatcctgctattttatctttattcacaagaaactttctatggcatctaataagttcttctgtactttcctcttcgattttagctagtgaggttgaagcttcaaaattcccttctgctgttacaaaaagaacagcatgagcttttgtagggtgagttgtaacataataaattttagagagtgatacctttacgatagctctatcttgatataaaatgtagtctttcatatttagcctccttctatcagtttaatcttatcagaatgatggaaattaaattataaaaatctcaaatggtttctatactatctcaaatggtaaaaattttcttaatttagacatttcatgataaaatagatactttttagtatctcaataatattaatctttcttcatttgataaactaatttctaatgaaaggaaagctatgaaggcaattcaaattttacactactctttatttggctatattttatctctgtatttaaaatattatttcttaaaaaaacattcaaaaatacaaaaattttacaaggacataagattaactacaaatataaatcttctacttattttatcataaaatcagggtctctaacatctaaaaaaatgaaactctatttaaaatctatccaatttagttcaaaaaaatcagaagtcatcatcataggcagtcagattgattatgatgagctttaccgaaaccactatagtgtgtttggtgttatagacataactaataataaatcattaaaatatattaaagaaaaaattcatttttacttggaagagctctatgaatttaagaaggataagagtgattaagtctatgaaataaagtttcaagtcttataactttatatccgtaatcacctatccattaattttgatttcttcctccatatgctagagtttgatatcaaattttagtgtcatcttaaagtagtcatattttgtcagtcttcttttttctgaattattgaaattgattagaacctctactattttattgatatgagctagtttattatgtgactttcagtcacataatagaaaaagttggagctcagtactccaactttttctattaaaatgtttggcgttttgctttacgctctgcacgaccacgtgcgcgattttcagcgcgcttggtcttgcggcgtttttcatcaaccgcccattgaattttcttcttataacctggtttgacttttttctttttctttttaaccaaaccaatcatttcgatatcaagtttatcttgttttttctcacggttggcacgacgatcacggtcataagtatcttgaaattccccgtctttgaccattttaggagtaaacttgattcccaatttctccaactcacggatatccgagtcatcactgggttggtaaagggtaatagctgtacctggtaggccatttcttccagtacgaccaacacggtgaacaaagaaagataaatcttgcggaatggcatcattgatgacatggctgacaccttcaatgtcaatcccacgcgctgccaagtctgttgcgacaatgtactcaaaatccagatttttcacctggttcatgatacgcttgcgttcacgaggggcaatatctccatgaatcttcgctaccttcaagccttgagcagtcagatatgaatgcaattcatcagcacgcattttagtgttaacaaaaatcattgccaaatacggttgcatcaactgagttaactggtaaatttgagcattcttgtcacgtccctttgtagaaatcaaccaattatcaatggtatcagaaatgaccgttttggtcttgattttctccataacaggatttgacaagtattttttcaagaatggttgcagtttttgtgggatagtcgctgagaagaccatgaattgcaagtcttttggaaggcttccagcaatcttatcaacagtttccaagaatcccatatccaaggtcatatctgcctcatcgaccacaaaggtcttagccttgtgaatagctaggtcaccagacttaactaagtcataaatacggccaggcgttccgataacaatatgaggctggttacttgccaatttgtcaatctggcgagccttatccgtaccacccacataattaaccacacgaacttcgacatctgagtgggctgcaatctgacgggctgcttggtaaatttgagtagctaattcacggctcggtgcagtaatgactgcttgaacactatcgtcggcttcatctaattgctggaaaatcggcaataggaaagtgtgagtcttacccgaacctgtttttgattcaccgactaggtcacgacctgtcaaaacaataggaatcaacttgtcttgcacctctgttggagttgtaaatttcaactcctccaaggcttcactaatatattttttaaattgaaatttcgtaaatgacataatatcctcgattctatctatcctatcaattataccatattttattccatttcagtagtctcacttatttaggctatttctagtagcttctctagtaaaaaaggctggaatttgtgaatcccaacctcttttcagtcattatttccagtttaaaatagcattcaagccatagtgatcactcacttgtggactcttgttaccatcaaatacgacatgtaaattttccaccgctaactccttggtagtaaaaacatagtcgattcgaaggggttcagtgttccccttccatccatcaatttctggtggaacagtatagctaccacttttctcttgagcaacttcaaatgcgtcttgtaagcctaatggactagctaaaatagcttggtaaccttcctgaccagctgggttgttgaaatctccagctagcaaaagcggcttgttcaattctttcaagacagcctcaattcgtgcccattcttcttggaaacctttatcccaccaagaaaggtggacactggcaactgcaagttcattaccatcgactacagtttcagccagggcgacacggcgagtatgatagtctgttggatcatccacatctgaaaccaaaatttctcttgcttcaataggtgttttagacaagatagccacaccttcatgatagcggtcataaccaatatggttataggcccaagtccaatagtaattttttccttgctctgacaacttttcaaccaaaagtctaacatagtgatcttggtgaataggctctgctgctggcaaagcttgataaaagtcattcacctccacctctagcgaagtgatctcctgattgatttcttggaaacaaatcaaatcatagtctttatcaagaatatcctcaagcaagagctggaatttttcctcagcttctttttccatccagctatgagtattgagtgttaaaaatttcatgcttttctcccaaaacaagaggttggaaaacagcttccaacctcaagtgtattacaattctactttagcaactgctgttttagctgcaagagaacctgtttgttctaatttaactgatttaatagcttcagcatttgtgaagacaaccactgttgaagtttcacgacctgctgcacggatagcatccaagtcagctgtgacaaggagatctcctgctgcaactttttgtccttcagcaacatgaactgtaaatggtttaccttcaagacttactgtgtccaaaccaatgtgaaccaatacttcaagacctgcttcagtcacaagaccaagagcatgttttgtagggaagatgcttgatacagtacctgaaactggagatacaatgtttccatttgcaggttctacagcaaatccatcacccatcattttttgagcaaatactggatctttcacttgttccaaagcaacaacttgaccatctgctactgagtaaacttcctcagtaagacctttgaagtgtacagtgttttgttgcgcttccgtcatttgacttggaagagtttcaggaatgatttcacctgaatcaaggatatcttggatatcagatttcaatacgtctgcttttggaccgtagatagcttgaactccttgtcctttcatgacaagacccatagctccttctgctttccattgttctgcatcaccgactttatcagcatcttttacagttacacgaagacgagtcatacatgcatcaacatcaacgatgtttgcacgtccaccaagaaggttgataatgtttacagcttgagaacctgctgcaactttcacttcgctgctagcttcttctgaaccttcagcagtttcgtagtttccgttacgtcctggagtggcgtagttgaatttttgaatcatgaagtttgcgataaagtacatgattacggcaaagagaacagttacccagataaagttaacaatatccataccgataccagcgctaatcgcaataggtgtacgagtcaagaactcgattgaaccgaatgagtgcatacgtaggtttactacgtcagccatagcgaaggccgcaccttgaacaagtgagtaaacaaggtacataggtgttgctacaaacatgaacatgtattcgattggttcagtaacccctgtcaagaatgttgcaagagctgttgcaatcatcatacctttgtatttgtgtttcttgtctgcatcaacattacggtagatagccacaaccacacccatcaagataccgaatgaaccaatcatttgtccaactttgaaacgagctgggtgaacagtatctaacaagtgttggtattgagtagcatcagtacctttaaggtttacaaggtctgttacccatgcaagccaaagtggatcttgaccaaatacttggctaccttttgctgcaccagttaagacctcataagtaccaccaagagctgtgtagttcattgggatagtcaacatatggtgaagaccaaatggtaagagcaaacgttccaatgtaccatacaagaatggtgcaaggattggagcagtttcttgtgagttagcaatccagataccaaagctattgatacctgtttgaactactggccagaaagcagcaagtacaattgcagcaattattgaacgaagaataactacaaacggtacaaaacgttttccgttaaagaatgaaagtgcatcaggaagcttacggaagttatagtatttattgtaagcagttgctccaataaaaccagaaataatccctacgaacacacccatgttaagtgctggagcttccataacactaatgaagtaatcagcaactttgattgatccaccaaagagagttgttaccatagcatctggatttttcaacatatcgcctgatacgccaaagattgtaccagtgatacggttaatcaagatgaaggcaagaccagcggcgaaagcaccaccagcacgttctttagcccagctacctccaatggctagggcgaacaagatatgaaggttaacgataaccccccaaccgatttgttctagtacaccaccagtaataacaagtggtgcaaaggttgggttaatcatcacgatagacttaccgattgaaatcatcaaaccagcagccggcataaccgcgataaccaccatcaaagccttaccgaatttttgccaaaactcgaaagacaagacatttttgaatgtatctttcatcattcaaatctcctttatttttatttaggcaaacgttttacgaaaacgtttgcactttctataatttaattataccactttaattttttttgtaaaggcttttataaaaaaaagtagacttttttctaaaatttttgtagtaaaaaaggagatattaaaatctcctcaaatatacttctattttattttagattttcaggaatcggcgcattgaaattcctgatccgattgaaccgataaaaattccaatcacaaataatagagcaatcatcagtggactgaatacttctggtgatatcattgaaaggttctgaccaaccaatgacttattaaccgattggtaaaccattttatagacaataaataccagaactgatggaagtgttgctccaagcaaaccaatgaaggcaccttcaagcaagaaaggtccgcggatatagccattcttagcacctactaaacgcatgatttgaatttcacggcttcgtgaaataatggtgatacgtatagtattagaaatcaagaacaccgcaatgaaaatcaataatccagcgataactagtccccagacacgaataaatgaggctaacttaaacaagcgttctgtattagcaccaccatcttgaacttctgatacaccttcgatttttttagcttcttctgctactgtctttacatcactgggtgtatttgtatcaacgatatatgcatcataaagaggattggcatcgccttcaaagattttccagttgtcccccattgtttctgtcaacttttcatattgttcttctttacttgaaaacgtaacacttttaacggttgacatacctttcaaagcatcatataccttatggtagtcgttatttgtaacagtttgaccttctttttcaatcgtctcactattatcagctacgtccttacgaatgtataccattactcggacattattttcgatatctgtagctagtttagccgtattaaagataacagatgcaaatattgcaaccaaggtcaaagtaatcataactgaactaacagcagctactgtcatccagccatttcgtttcaaactttttaacgattcaaataaatgacgaaaaaatctactaatcatcgtatccatattctcctttagcttcgtcacgaacgacacggccattttcaatggcaatgacacggtggcgcaaggtatttacaatctgactgttgtgggtagccatcaagacagttgtaccttggagattgatgcgttccagcaagttcataatttcccatgaattatctgggtccaagtttcctgttggttcgtccgcaatcaatacttttggattgtttacaatggcacgtgcaattgcaatccgttgctgttctccccctgaaagttcatttgggaaagaacgaaccttatgcttcaatccaaccaagtctaagacttccataacacgttttttgatattacggcgactttctccaattacctccattgcataagcaatattttcataaacggttttctttggtaacagtttataatcttggaagacaaccccaacactacgacgtaggagaggaacatctttctttttaattttaaccagattaaaaccagcaacagataagcttcctttttcgatttttacttcgcgatacaaagaacgaataaaggttgatttcccagctcctgaaggtcctacgatgtaaacaaattcccctggttgaacgcttaccgaaacaccacgtagggcagtcgttccgttgtcgtattttttgacgacatctctcatttcaataattgacatgtgagttcctttctatcttagctgattctccacttgagataggcatcaataaaaccatctaggtctccatccataaccttatctacttgtgcaacttcaaagttagttcgatggtcttttaccatagtatatggcgtgaaaacataagaacgaatttgacttccccatgtgatttcctttttctcacccttgagggaatcgacttccgcagctttcttctcctgctccatttgatagagcttagcctgcaacatcttcatggcacgatctctatttccatactgggtacgatcgactgttgactgaacgacagttcccgtaggaatgtgtgtcaaacgcacacctgtggaaaccttgttgacgttttgtccaccagcaccacctgaacggaaagtatccatcttgatatcatcttcacggatttctacttcaatagtatcatccaattctggcatcacttctacagatgtgaaagaggtgtggcgacgtttagcagagtcaaatggtgaaattcgtaccaaacggtgtacacccatttctgacttgagaagaccataggcattaggtccttcaaaagataaggttactgacttgataccagcttcatctcctgcttggtaatccaatacttccactttaaagcctttagcatttccatagcgagtgtacatacgaagcaacatatcaccccagtcctgagcctcagtaccaccggatcctggatggatttccaagatggcattattatggtcataaggttctgacaagagcaaggtcatctcgtaactggtcatcatcttatcaagttctgacaactgttcaaccaattcttcatgtaccgactcatcttcagctaaaaagtctaataaaatttcaacttcatcctgcaactcttccattttgtgaaaggtgttataggtgttttttaattcatttaattcttgcgacgttttttgggccgcgatattatcgttccaaaaatcaggttctgtcatcttgttttccaagatggcaatctcttcctctaaaccttcgaggtcaaagagaccccctgaaagaagctaatttttcacgatttgcgtcaattttctgacgaatttctgaaatgtccataaatactccttttttacattatttcattatagcatattttatcatttctttccatcttttgctctaatcccttattacacgtaaaaagaagcctttcggcttcccttcttacaagacttttgctgaagtacgagtaatctcttctacttgaatattctctgattcaaatttttctttcaaggctggtaaatcaattgatccatcgatttgaacttcgataatgaccttaccatccttacgcggaatattgactgtatgcgagatattcaaattttcttctacaatcaaagaaataatttttccaagaacgccaacttcgttttccgtaacaaagcgcacacgaatcccttcttcaccataacctgcaatttcaagaaaggcttggaaaacgtcacgatccgtaataactccgtatacttgatgattatctacgacaggaagaataccaatcttatttttcaacatcagataagttgcatcctctagactcgcatagcctgaaacagtgacaacatcgcgaatcatcacatcttttacttttgtcttatttagaagataattcatctcatagatagaaagacttgttgctttggatggactagcttgggcaatggttccctcagttaccaaaccaaccaattgatcattttcgataacaggcaagcggtgcaacccttgctctctcatcaaatctgctgcatgagatactgttgtatccggactaatataaactaccttgcgggtcataaaatctttaactgccatgagacttctccttttctattcttatccctattatacaatctttttgtaaatctatcaaacgcttacatttctttttcaaaattcagaaaagtatgaataagctagcaaaaagagctctgaaatagagctctctgaatgaaggtaagatacatttcattcgattttttcaattattagaaattaaccttttaatgtagataaagattgctttacaatctatatctgtcaactaaaaaggtcccctggactataatgatgattacttcgtaatcctcatccaccgactaaaacaatccagtggattgttttagccacctaggtatgcttttctgacttcttctgatgaagcgagttcttttcctgttcctgatagaacgattttccctgtttccaatacatagcctcggtcagagattgcgagtgctttattggcattttgttcaatcaagaggacggttgttccttgtttctggatgtcttgaatgatatcaaaaatctcttggataaagattggggcaagtcccattgatggttcatctaaaagaagaagttttggtgttgacatgagggcgcgtcccatggcaagcatttgctgttctccccctgaaagagtagctgcatcttggttcttccgttcttcaagacgaggaaagcgtgagaaaactttcttcaagttggcttgattttcttcacggtttttctttaagaaagctcccatttcaagattttccataacagtcaagccaggaaagacgtggcgtccttctggaacttgtgaaagaccacctgccacgattttttgagctggcattttttggatttcttgacctaaaaattcaatctttcctgaactcggtctaaccaaaccagacaaggtacggagaatggttgtcttacctgcaccattggcaccgataagggaaacaacctctccttcatttacttcaaagcttacatcacggactgcttggatcataccgtaatgcacagaaagattatcaacttttaacatagacattaggcttcacctcctagataagcttcgataacgcgtttattggtcttaatttcgtctggagttccctgagcaatcaaacgaccatattcaagtacgtagatacgttctgtcacttccatgaccagattcatatcgtgttcaatcagcatgatcgtaatcttaaattcatctttgatacgacgaattaactcagtcaattcggctgtttcctgtgggttcatacctgctgctggttcatctaaaaagagaattttaggttccgtagcgagagcacgaacaatttccaaacgacgttgttgtccgtaggcaagatttttagcaagagtttctgcatcaccatctaaatcaaagattttcaacaattccaaagccttagcctttaattctttttcactcttataaaaagctggtaagcgtaagaaactagcaaaaacatgttgtttgtgatggttgccaaaagcaatcaaaacattatccaaaactgttaaatctttaaagagacggatattttggaatgtacgtccaagtcccaaagaagcaatcttataaggtgactttccattcaaaaggtgaccatctagggttactgttccctcacttggttcataaacacccgtcaagaggttgaaaagggtggttttcccagctccgtttggaccgattagtccaaccaattccccttcgttcaattcaagagtcacatctccaacagctgttagaccgccaaaatgtttggttaactgttttacttcaagtaatgccattagttttgttcctccttcttagattttttaaagaaacgtgataggctcaattcccatgttccaagaagtccgcctggtctgaaaatcattaccaataccaaagccaaagcgtagataatcatacgcacgctagcaacatcttggagaagcatattcaaaattcccagaacaatagctgaaacgattgcacctgtaatggaaccaagtccaccaaatacaacaataatcaaaacattgattgagttgatgaaagtgtaatctttcggtacaactgaaccgataaatcctgcctgaagtgaccctgcaatacttgcagtaatggcaccaaagacaaaggcgatgattttaattttagtcgtattaaccccaactgactcagcagcgatttcatcctcacgaacagaaagggttgaacgaccaattggactacgcaagaagttcaaggttgcaatagttgtaatcacgacaaagaagtaaaccatttgccaagttgtaaagttaggaattcccaagatacctgccgcaccatttgtaaggcttccgccattgatgataaagatacggataatttcagaaacacctagagtcgctaccgcaagatagtcccccttcaagcgcaaggttggaattccgacaagcaaggcaactgctcctgaaagcaaagcccctacaagcatagctccaaagaaggcaccgtaggttggtgatttagaaccaataatagctgctgcataggcaccaatcgccatgaaaccagcatgaccaagtgaaaattggcctgaaaaaccaacgattaagttgagaccaacagccagaataatattaattccaatttgttgtaaaatctgtacatagaataggtttagtactccaactgaaaccaatacactaatcaagccatagccagctaacaaaaggagtaaccatagaatattaacttttaaattttctttcatcgtttacaccttctctttcacatttttaccaagaatacctgctgggcggacaatcaagatcaacaacaggattccataaacaatggcatcacggaagtctgacattccaaaggctgtcgcaaaggtttccaatagaccaatcacaaagccaccaagagccgcaccaggaataattccgataccaccaagtactgcggcaacgaaagacttaagacctggagtaacccccatcaaaggctcaagagagttataataaagggcaatcagaacaccagccgcacccgcaagagctgaccccaaagcgaaggtaaagctgatagtacggtttacattgatccccatcaattgcgctgcatcgctatctacggatactgcacgcatggctttccccatcttagtcttttggacaatgacttgtaacaaaatcatcaaaatcaaggaaatggccaaaatcattaactgcacgtttgttaggctaactggtcccaaatcatagcgaactgtttgaatcgcttgagggaaggcacgggtattagcaccaaccagatagaccatcccatattccaataggaaagaaaccccaatagctgtaatcaaaacagcaatacgagtagagtgacgcaaaggtcggtaagcaaggaactcaatcacgacaccaagaatggctgtcgctaacatagctacaataagagctacaaagaaattcatttggaaagaattaatcaagaaataaccgataaaggctcccatcatataaatatcaccgtgggcgaagttgatgagcttgataattccgtaaaccatggtatatcctagggctaacagcgcataaacactacctagaatcaaaccatttactagttgttggagcataagattcactctttctatttataattttgagggtttcccctcactttttgataggttcttaaacatcgaaacagggagtgagtcagaggctcattccctatttcaacatttttctattatggttttacaacttctgctgcttcaaccttaccattgttcatggtcatcatgtaagcagttttgactgtgttgtggtctgcatcaaagcttgtttgaccagtcacaccttcaaaatcttttgttttagcaaggttatccttgatttcaccagagtttttagcaccttttgctgcgtttgctacaaggtgaactgagtcataagccaaggctgcaaatgttgaaggctcttcgttgtacttagcacggtaagcatcaaggaaagcttttgctttagctgaaacttctacagtagttgagaagcctgagataaagtagatgtttgatgctttttcaggagttgcttgttgtacaaactcttcaccgttgaatccatcaccaccaacgattggtttgtcaattcccataccacgcgcttggtttacaattttaccagcttcagtgtagtaaccaggaacgatgatagcatcaaaatctttccctttcatttttgtaagggctgcttggaagtctgtgtcacctgctacgaaagtttcatctgcaacgatttcacctttgtaagcttcacggaaggctttggcaatacctttagcatagtcgctagcattatcagtgtaaagaacaactttcttagcttgcaatttttcagaaacatagtttgagataatttttccttggaagctatcttggaaagttccgataaagaggtaatcttgacctttagtcaatccatcttgagtcgcacttggcgaaatcaatggaacacctgcttttgtagcgttagctaccgcagctgcagttgcaccagatgtcgcaggtcctacgattgctgatactttagattgggttacaaggttagttgttactgaagccgcctcagctgtttcagacttgttatctttatcgactacttcgatttgttttccatcgataccacctgcagcattgatttcatcaacggcaagttgggcacctttttgttcagatgtaccgtaggctgctacggcaccagtttcttcaaagttaaatccaattttgattgtcttttcatctactgaattaccagcagcgtttgacgctccagacttcacttctccacaggctgcaagaagtgctacacttgcaagcgccacaaacgatagggcaaattttttcttcatcttttttgtctccttattcttaaataaatagcatgttaagaatataccgaattatcagaaaattgtcaacacttttcttagactttttcgatgataacgttttcctctcgataaagattgcccacaaagggtgtttccaactcttggatatgacaaactctaactttttttataaatttttccttgcccaagcgcccgaccaattgctccacttcttgagttggaacataaagctgtaagtaacgatgtttcttggaatgataggtaatatctccataatcctgcagttttttggcatcacgattatagtaaagatagataatcaagccagatcgattgactttttcaaacatgataaatcctctttctaagaaatctctccctattataccaaaaaaagcaaacccagtcgagtttgccttctatcaccattaattcaatgaattgttggccatgatttcatcaataaagccatattcaagtgtttcctgggcgctcatccagttatctcgttctgcatctgcatggactttttcgattgactgacctgaattttcagccaagattttttccaaagtattacgagttttaagcaagtgttctgcagcgatcgccatatcggtttgctgagtacctccacctgtaccacccattggttggtggatcatatactctgcatttggaag

SEQ ID NO: 66 - DNA, 71904 bp, Streptococcus mitis NCTC 12261 contig12
tggaaaggtaaacacttccactctattattgtatatgctggaacctggcgatgcccttgtcatgaacgacacccgagttctcccagcccgcctctatggtcaaaaggaagaaactggaggtcatgtggaacttctcctgctcaaaaatactgctggagatgagtgggaagttctggctaaacctgccaaacgcctcaaggtcggtactcgtgtcagctttggtgatggccgtctcagcgctgttgttacggaagaattgactcacgggggccgcattgtccgctttgagtaccaaggaattttcctagaagttttggaaagtctaggagaaatgcctctgccaccttatatccacgaaaaattggatgaccgtgaacgctatcaaaccgtctacgccaaggaaagtggctctgctgcagcaccaactgctggactacacttcactaaagaactgctggcagaaatccaagctaaaggtgttcatctagtctatctgactcttcatgtcgggcttggaacctttagacctgtttcagtcgacaatctggacgaacacgaaatgcactcagaattctaccagctttctgaggaggctgctgccacccttcgatctgtcaaggaaaatagtggtcgcgtcatcgctgtcggaaccacttctatccgcaccttggaaactattggttccaagtttgatgggcaaatccaagcagattctggctggaccaatatctttatcaaacctgggtatgagtggaaggtcgtggatgccttctcaaccaacttccaccttccaaaatcaactctggtcatgttggtttctgcctttgcaggtcgcgaattagtcttagatgcctaccaccatgctatccaagaacactaccgcttctttagttttggcgatgccatgtttatctattaatttcataatgaaaaaacgcatattatcaggcattataaaaacttgatagtatgcgttttgctatggataaaaattgagttaatttattctcaagctcggatctttcaagctctgaacactggcattgataaccgcgccgacaatcaaaatcttagcgatgagaataaaccagaacatcatgaccaccacgacgacggaactgaaaaaacgcacgtctactaggcgattgacataattgttaatatagactgaaaagatattgagcagtaagaccagagtcagcatgacaaaggcactacctggtaatacagagcgaattcgtaggaccttaacattaggcaggaagtaataaagcatgaccaagattgcaaaaatcaaggcatagacctaggggcctgttaggtcttgcagataatcaaagataggactatccgatttccagtagctcttgataaggttgagaagcatgcgaccaaagacactgagaaagagggctaaagcaaagagaatctgcaagccaaaactgacaaacaaactcataagctgatgggaaatcattccacgatttttagctactccgtaagctttattaaaggctttctgtaggaaattcatggattttgaaaaggtccatagagctgacaaaaccgcaaaactcaataagcctgttgacggttgggtcagcacttctgtaataatctttgcaaccacatcatacatggtatcgggcaaaaattcattgacaacctttaaaaaattagaaactggaatccgaaaataagggaggatattaaccaccaccaaaagcagggggaaaatcgaaatcaaccaatagtaggctactgcgacactggtcaactcactatctgatgcttgataataatgcaaaaaagcttttaataagggcttatctatcagctctttccaccactttttcatgtcacactccttcacttataatcttatactcmatgaaaatcaaagagcaaactaggaagctagccgcaggctgtacttgagtacggtaaggcgacgctgacgtggtttgaatttgattttcgaagagtattaactaatttcttcttaccaattccaccatatcataaggcagggtattggcagcttccttcaaggaatagttctctaggttatttacattttgtcgtaacttcttggcatacttggtcgtaatcaatcgtttttcttcgtattcgaaaatcaacttgcgctccagataatagcctctcagcatttcatcgatattgttgggtttgacacgattgataacccgttcgacaaaggcaccactggtgataatagctgtttctctgagacgagaatcctgcatgaaactgatcaaagaactcttataaaccccttttaggttctccagactttcgataatcatctctgtattttctagatagagctctgcaatttgatcatagtcaagggctctgagtttctgtgattcttcatttttccaactgcggaaggtcttgccaaaggtaaagacttcgtgtaggagaaaacgtaaaatccgcaaggaaacaaggaaataataggtcaatcgtgacgcaaacttacgattgatactttgttccatgtttttcaaataacgttggtaaacccgataagcacgctcactcatcttgccttcttcgtaagcctgttctaaaccatcactttcaatactgaggatgagaagttttaagccctcccagtcttcttgagcccccttattttcttgactcaggatgagattttcaatacgtccatgataattgtcaatagccgcatagagagggagcttatttctggtatcttccaactctttttccaactctagcgttacttcattcaaaatggcgatatgcataagatagtccttgctttcttcctgttcatcagaaagatgaggcaagaccacgaggcctgttaaaaagcttacaagagtcacacctgcgacaaggaaaagcaagagaggatactcctgttctagattacttggtatcagaaggatcgtagcaatcgacaccgttcccttgacacctgagaaagtcaaaagaagcatgtccttcatatacttatttagttttttcttaaggcgtcgggtcctataagcataatagccataaatcatgacaaaacgaatggcaaagaggacaaaggtaagggctataagagataccaataacagtaagggattatagattgggttggtcaagataggctctgctatcatttccaactccatccctaaaatcacaaagacagaaccgttcagcataaaggttactgtatgccagaccgtctcggtcaccgtatccacttgggcttcaaggagcgtaattttcttaaaacggcttgcctttaaaatcccagcaactacaacggcaataatccctgaaacgtggacttcttctgccaggaagaaggttaccaagggcaaactcaattctaataaaagttcgctggcaatatccgttgctcgtacactaagtaagaaactatggaggaaacggttggtcatggctgttaaaaagccaatcaaaaaaccgcctaggattgaaaagatgagcgaactactcgcttgcccaagggaaaaggccccagttgtccaaactgtcaaagctacctgaaaggcaaccaagccagaagcatcattcaagagtccttcacccttaaggatattggacacgcgcttaggaaagctaaaccgctccgaaagagaggcaaaggctaccaagtccgtagggccaagtgccgccccaacagccaagcaagccgccaagggaagactgagccaaagaagatgggacaagccacccaaactcagggtcgagatgaaaatcactggaaatatgagataaacaatgattcgccagtgttttaaaatagccgtaatatctgcttcctccgactctcggaaaagcaagggcccgataaccagtgccaaaaacaactccgtattgaggtgaaagtcggtattgggtaaaaaaagaccaatcacgattcccaaaagaatctgcaccaaagggagaggcaaaaagggcaggagcttattggttgtacttgagacaatcaagaccagtaaaaataggataaggtaaatcagtaattccacggacttcctccttaattttttttacaacaggattcaaatatctccttctgctctttgattttttgatcaatcttggaacaatccttgtgctcaatttttctctggcaccgttccatctcaagagcaactaattttttcttgattttaagcatttttttgctcatgtgtgcttggtctaacacacccaccgctcgttcgtgttgggttgattcaacaaaattctggcgcatggcatccagcttttcacgtaggtattgtttatccatgtctatatctctctaatttttcaatcatcactaaaaacggtgggttgttgacttggttcagggttcggtaaatggcagctgtgtactcttgttggttcaactggctgacaaaatccaagacagcatccctctctaggtcgcctcctttatgaccataatagatcatgatagcaatccgtccacctttgacaagcaaatgacacagcttttctaatgcttcaatcgttgtctgaggttgggtaatgactgacttatcagctgatggcaaatagcccagattaaaaatccctgccttggcttctgtcacaaactggtccagtgtctcgtgaccttgcaagattaactgggcatttgtcattccagcttggtccaaacgctcttgggtcttttccaaggcttgctcctgaatatcaaaggcatagacttgcttagctagtttcgctaaaaaaatcgtgtcatgaccattacccatggtcgcatccactacgatatcctcttttgtcactacctcagccaaaaaatcatgtgccatctcaagtggtcttttcattttcaaactcctgttttacagccttgcatccttgaatacttccacgacgtcgcatctccatctcaatgctgttgagcacttcccacttattgaggctccacataggcccaatcagcatatctctaggtgcatctcctgtgattcgatggatgacgatatgcttgggaatgatttccagttggtcacagatgaccttgacatattcgtcctgactcatcagttgcaaacgtccctcgtggtagtcccgttgcatacgagtattggtcatcaggtgaagcaagtgcagtttaatcccttgaatatcgttatccgtgacacaacggcggacattttcaatcatcatctcatgggtttcaccaggaagtccgttgatcaaatgagaaacaatctcaatcttgggatattttctcaaacgcttgaccgtctccacatacaactcataggagtgggcacggttaatcaggtcagaggttgtttcataagtggtctgcaagcccaattcaaccgtcacatgcatgcgctccgataattcagccaaatattcgatggtttcgtctggtaaacagtctgggcgcgttccaatattgattcccaccacacctggctcgttgatagcctgctcatagcgctctcgaatgacttccaccttttcatgggtgttggtaaaattttgaaaataaaccagatacttctgcacatctggccacttgcggtgcataaagtcaatttccttataaaattgctctcggataggcgcatccggtgctacgatagcatctccagaacctgaaaccgtacaaaaagtacagcctccatgagccacagttccatcacgattgggacagtcaaatcccgcatcaatcgggactttaaaggtcttttctccaaagagttttcgataataatcattcaaggtgttataagatttcataactttcattataacaaaaaacatctacaatctcaaaagcctgactttcctataaattcctctgtttctcgtttccattagcgattttttatgatacaatatgggtatgattttaatgaaattagcatctattttattattgatactgaccctagtagtctgcattatcataaccaaactttttagattaaaaaaactaggacgaaactttgcggatttggcttttccagtcttggtatttgaatattaccttattacagctaaaacctttacccataatttcctccctagactgggcctagccctctcactcttagccattattctcgtctttttcttccttctgaaaaaacgcagtttttactatcctaaattcatcaaattcttctggcgtgcaggattcttattaacccttgtcatgtatatcgagatgattgttgaattgatggccctctagctgaatcttatatgagacataaaaaataaaggatttaacccttttgacttgggtaaatccttttttcttgtttaaaaatcgtttgagcagagcgtttccaagcgagacttcacttgtctcgcttgggaacactgcacagaataaatcttatgagaaagttacattcctcaaatcaatcttatccgatccactcaccgttttcatttacttgataaccatccggagttactgtattgacagcaagggatccatttgcatcaacataataccatttgtctccaacttggaaccattgacttgtcttcatcgaacctgatgcatcaacatagtaccacttaccatcttgatccaaaatccactcattagatgacattgcacctgattgattcaagtaataccatgcacctgattgatctttaatccagccagtttccatttttcctgtttgatcaaagtaataccaagtatctccatctttgacccaacccttagccaagtccccattttgttgacgataataccatttaccatcttccttgttccatccaggttttttgctttcctgagtaggagcttgtatcacaatgttcggagcaactgatagatgatttttaaaatctgaactgttacttgtcacaccattatttgatggatttggaatgacaatatttggattcggatttgctcctggtttttgttccgtaggttgactgctaccattgtcttgatgtccacccgccggcgtctcaatgttacttgttttcttcttagtacctaccaacagaattctatttacaggttcttccagaatctcacgtgatttttctttattcttgccatcagtcgttacttctgtatagatacgttccttaccaactttaccttcttgcaacaggcgaacttctccctcaaacagagtatcgtctttttgttcaagagtttggaagttcaattctttgtctaccacttcaagactaggcaagtcatattgagcaggagctacaagttttgcgtctatcactttttccttagtcaatttaatccggtattctttgacattcttaccactctctgataccagacggactaatacaggaagattttcatttccactatccacaattgtagatgtgacttgatctttcccttctacagtgatttttggacgttcccctttataaatcaattcatagtccaaacgattttcagagaagtcaggaagctctttaccatctactaaaattcttccctctgtgctctcttttgcaagctcacttggtgctcggaaacttaattcagttagtgcaaccccatttttatctgcttttctgtccatacgccatctcatagctttggtagtcacagctttaaaggtcacattgatctcatttccagcttgaatttctttgtctgcgtaataaggaacaagttcccaattatcagggttattaaatggatgatttgattcgtagctgtagtttgaatagtaaaccggaacatcaaagtcaggaccgatgtatcgttccaatacgagtttagctggggcatctgttccactatctgcaaagaagtttagtttagcttgtgaaacctttctatccacaattttaccattctttttaaagataacaccaactgatacttctggattagcagatggagtagcggaccagtttgtccaacggttgtcttgatttcggtcattatcatttaaatagtctacacggtcgttcgaattatcatccaaatcattagtagctgaagcaaaagcctgactatgagtagcaagataatctggattatcagaaagtgatctaccgaccttgtccgttactcgaacagataattctactgggacctcactaccaactacatggcctttaattgtatattccccagctttgtttaaggtagaagcagggactttttcccattcaactgccaaatcttttacgtcataaccgctcttacctgcgaaataaactggaaccttatttggcaattccaaaggttgacctaactgcaacaattgagactgttttgcagaagcaattggtttacgagccaacaaatctttatcttttgtaaagtgaaggttgtattctccaagaatatcgccattttctgctttcacaataacacggacaggatcgccctctttcacgctaggaaccactgtagcaagtccattatttgtgatactagctgttacttctggaatttttccatcactatagtctaaatagtaatctgttaagtctggattaaagtgaggaagatcttttccagcaaccttaatgttagtagttgcctctttagctggtgctacctttttagagaaaacttgtaattctgtaatggatgttccaagtttatcatcagctcttgtcatgcgaatacgtaccgcgtaggtatccaccttatcaaaactgaaatgattcatttctccagcttttaactgatctggagccttaagatttgtgactggtttccaatttttactgtcattaaatacgtggttttcaccctctacataaccaggattcttcggtgcagttggagctttttcaccaacataatactcaatgacgtaagattttggagcacctacaccgctatcttcataaaatgctacattcaagttatcgaccgaacgttttgtcaaaatacctgaatctccaaagagtacccctactgaagcttcttcagaacgtttccagtttgaccaacgatttgcaggctgatcaccgtaagaaatcactttatcatttacattagatactgggtcataagaatgagaatctgatgcaaaggcaagtggtaattctgaacctgtccattgatctgaaatattcttcccaatttctgtttgactcgatacacgaacatgtaatttcgttgtcagttgtgttccttctacatggcctgttacagtaaagattccttcttttgcatactggcttgcatcaatagtgtcccaagccaccttagctgaagatacttggccatttgaataataagttcggacactttctggcaaggttggtgcctcagaaattggtgttgtgatgctcacatcttcaacttttacaattccttctactgatactgtcgcacgagcttcttgattcaatccttcaaccttaccaagtacttcaaaagtatgatattgatttaatttttcagatggaatcgaatcccaaactaccttatgaacttttggaaatcctttatcgtactcaactgttactgtagatggaagatttggtgtttggtgcaaatctgtcacaaggctaactgggcgaatggcctgaacaactttatcttcagtatttgctgcgatcgttagaggaagttctccttttgcaccttcatattgagcttgtaaagtgagactacccggtttatgcaactctagcattcccttattaacagagactcctccctcgccttggcttgagaaagtcaccttatcagttggtaaaatagcttcagttccatcctgataacgggctaaaactgtcactttaacagtttgatcttctttgaggctagatacttgatccactctgagactcaagctttcaatttgtggagaatcaacaaggaactgaacagcataggtttgtaactgtcccccgtctttaggctgaatgtagatactagcacgcattccattggattcatttgcctgaatcacgttcacatcggcattttcagcactagcactgacttctggaatttttgctccataagaaagtttgtgataatgtacaggatgctcttttgaaagttccgtaacactttcaccacctactgctatatttggtgtaacttgagacaattccttaccatcatcaactatcaaagtagcgtggatggttctatctcctaattggctagtcatctgaatatgtgcccccggagtagataacttctctttatcttctggtgaaatttcccaattttcaacttcataattgtgaatacgaccatctgttgaaacaagtgaaacaagtttatccacagaactcaagtctgttccaggtgtgatgcgtttaacagctggaagttcattcgcaactgtaagtacttcaacacgagcctcaacttcacgtccatcagacataccttttacagttacaattccagcttgactgacatctgcttgagaccaggttacaggacgtttttcacgactaccatcactatatacaaatggcactgtctgaggcattttaagtttttgtcctaaaactgtccgaacttttggtatttctgttcctaaaacagttttttctgactggtctgacttacctgtaaaaactgtaacttgatctgatttcaacaagcctgaatatgctgtaagggtaaatttacctgcttgatcagtcgatttaacaatcgctacccctttaccattaaaggctctacgaatccaagaaccatctgcttgttctttataacgttcacgactagcttgctcaccattatccacaccaaccagttgaccttgtccatgaagttggaagtgaactagattgttagcagttggcacaacattacccttgctatctacaatttcgtaatagatataagtcaaatcttttccatctgcagcgattgcattttcttccttaaccaaacggacacctgcaggttcaccagcagttacaatcttatcacgagcaatttccttgccagactcatctcgagctacagcttccaaagttcccggtttataagctactttccactccaagtatagttcttgaggattttcaccttcttgatatgttcgaccgtcacttgtttgttttttgttgaattttttaagacctagtgactcattatttaagaacaactcaacactggcagcattggaataagctctaactggaattcgattttcagcgtctgcaacattatctgccaattcagtcttttcccagttccagtgaggaagtaaatgaaccattggttttttcttggcagaaacccactgactttggtagagataatagtcattttttggaatacctgcggtatcaacaataccaaagtaggaactttttactggtgtactattttgattgtgccatggtgttggttcaccaatataatccgtaccggtccaaatgaattgtccagcgtatcctggatgatctctatcgaaggtccatgatgctgtagcagttttaccccaaccaacacgatcattaccataatcggattgttcgtaattacgccaatattggttacttcctacccactcactctctggatggaaataacttcctcttgtacgagttgctgaagatgtttctgaaccatagatgagccatttcggatgtttcgcatgaagagtttgataattttcttcagagtaattcaatccaactgcatccagttcatctgcaatcttttcatggtccccagttccatctccgaaacggaatttatcagctcccatggttacataacgtgtcttatcaacagatttcaccactttgaccaaacgtttgacagttaccagtgaatgggctttcccatctgcttcaccgatttcgttaccaatagaccacataacaacagcaggattgtttttatctctttctaccattgttcgaagatcgtagtcggaccatttttcaccttttcttgcttcagggtgggtagcatctttttcaaagaaacgaccatagtcgtatggtttcttacctccataccaagtatcaaaagcttcttcttgaacaagcaaaccgagctcagctgcaatctgcaaggtctgaggacttgctgggttgtgagtcgtacgaatcgaattcactcccatttccttcatttgtttcagacgacgatattctgccttatagttttcttctgctcctagcgctccatgatcatggtgcaatgaaacaccgtggaacttgatgtgttcaccatttaaagagaacccttggtctggagtccagttatagtagcgataaccaaataaatctttctttgcatctacaagctgaccatctttgtaaacacgagttaccatctcatataaagcaggtttgtcagatgacactgtccacaattttggtttttcaacctctaatgctgaatccaaatgaatggtttccttagcttttagagttttactctcagttcgaacaagttctgtaactgccttaccacctcgttcaaaaatttgatactctgctacaatttcatggtctttattatctgtattaacaattttactgcttacttgggtttcaacttttcctccttgttgactttctagttttggagttagaatagttgtcccattcttttcaacatgaatcttgtctgttacctgcaatgatacgtctcgatagataccacttcctgaataccatctactacttggttgcttattaactgcatgaacagaaatgacattttctcgcccatctttatggagatagttactaatgtcatatgaaaattgattgtaaccatttggatagtgaccaactagttggccattgacgaatacttgtgaatccatgtaaacaccatcaaaggttacacgaacatctttattcaagtccttttcatctaacttaaaggttttccgataccagccatctccaccattcaattgaccgccttcgttttgagctggtgaatcatggtcaaaatcaaaatgaatactccagtcatgaggaagatccatttttttccatgaagaaatatctgcgtctggttttacagcttcctttgcattggcatttagtttaaagtgccaattctggttgaaggaaatgtttctatcttcaattaacttatcaactacttcattcgtagcagatttgaattcttgcttatcttttgaaacagaacgatcttgtgattctgctttatttgtttcttcagatttatttttatcttcagatttatccgttacctcagtcttatttgtttcttcaagcttatttctatcctcaggcttgttcctttcttctgttttgttttcgacttcagccttaccttcttctaaaggaactgattgattattggcaactgaaactaaaggttgatctgcgtgaggttttactactgcatcactaccatccgcattttcctttagagatacattttcagctttaacaggttgctcacttgctttttcagtcgtaacaccttcagctttatgttcacttgagagtccagtagttttcaggttttcagactggtgctcagtcctatttgttaacacaatttcttcagcattttcgttggcatataccgaagaagatagactaacgcctgcccctaataatagagcacatgtccctataagcaccgagcaagcaccgactgaaaattttcgaatactatacactctttttttgttccaattacctttttgcatgtaatcctccttttggtaaccgctttcattttatctgagagcaatctacttattataattatcttataatacgattttataaccaataaaaaatttgtcaatcgaatacagataaaaacaatgttttggaatgttttttataaaaattggagagtttttaaaaagtattgaagtagaatttattataataaaaatgatttccgactttctttaaaattttaagacggaatagttttttattatcccaaacagaaaaaatctttcttaaagatttaaacatacaaaaagagcaaacgaatatttcagtttttttctgatttcgttaactcttaattcttagtttgatttattaatattggttaaatttatcctattcctagacgttaatatccagatttatcatttcacatcgctatttgaaaaatcttattttccttctttatcaggaaagataaatccaataccaatgcaagccagcactcccgctccaattaccaagctacttgaaattggtaaaaggtccaaaattgcattcgcaatgataaaggcaataatcaaacacatcaaactagccttgtagtcctttttcaaaagattctctagtgtgaaaaagaggaacaagcctaccggaatgagtgaccagaggttgacatccaaacttggccatccaacagaaccaaaatacactactgtcgctgctgctactaaaaatacaattcccaataattttttcatttttatctccaatttcttttttaggaacttgagttatctgatatcgatccttcatgtcccttacaaaaatcattatagcagagtcagtttcaagaacaagtgcttttgcctatctggtctctatctcggtctaaatggttcaataattaaaaaaaagaaacccagtagaatgagtttcttcactttgccgattgcagggtttgaacctgtgacctaggctttacgagtgccttgctctgccaactgatactcaatgaaaatcaaaaagcaaactaggaaactagccgcaggctgtacttgagtacggcaaggcgacgttgacgtggtttgaatttgattttcgaagagtatgagctaaatcggctattacacttaaagtatagcactctaagaataggtgtcaagaatttttcatctctattagaaaaagcctgtcctgagacaaggctttggtattctattatttacgaacctgcactttcgtaggcatccaagcccctatcccaaagtttaagggaaatgacaaagaaaaccagagaaatcaacatcaaacctccgatgttaaagattacatccttgtcctgcaagaaatagctggcaggatagtaggccgtaaaggcaaatggcacgataaagctaatcaaccatcgaaggactgaattgtaaatggaaatgggatacttggcaaaatcattaaacatataaaaaatgtaaatcattgctcctgactgcttggtccaaaaagcgatgctggctgtcgctatcttcaaggaagtataaatcaaggtcgcaaaaggaatgcagactaggaaaagtaggaattttggaagagtccaagcaatgctagataccgttgtcgctagtaggatcccaccaaccaagagttctcccaaggcatcaatctgaaaagtctcaactagaatatgaaagagaggattgataggacgtgtcaaatacttgtcaaactccccttttcgcaccaagcgttgtcccagtgcccagagattgtcaaaaaagagatggtccagtcccttgggaaccaaggaaaatccatagataaaagcaatttcttgaaaagtccaaccttctagggatgggatgtgttgaaagatgacattgagaaacaagaggttcaagccttgggtcagaaaaactcccagaacaccaactacaaaatccaccttgtattccatgatttgcttgatgtattgtctgataaaaatcagatgcatgcgttgatattttttcatactaacctccctgaatggtaatgaatgactggactcgtttccaaatcaactgagacaagcccaccatcactaagagccagaaaaactgcaaagcgagcgcctgaagaatctgattggcatcgtatttcccaacgataatcatgaccggagtgtaaatcaaggatgaaaaaggcagaaaggacaaaatatctgataccaccttgggaaagaaagccaagggaatcaaacttccagacataaaggccactattgaagtcttaagtaggttggaaccccaaagatttttaaacacaaaggcagaaaatccaaagcagatattaaagaaaaagttaatcagataggccagcgttaagctaaaaagataaaggacagttaatcccagcacttctacaatcccttgcccagatacgattttcatcaaaacaatgacacttaaaaatggaaggccaacagagataaaaatcaaccacttggagccaagctctgtaaaaaggtaagatgccgcaaaatgcactggtctcaacaagcgcatgataatggagccatccttgacctcctccccaatcataaaggagctatcagatctggtcaaaagattggtcacaaaactcataatgatgtagagggtgatatctgccatactaaagccctgaatcaaggactcttgcgaagaatcaaagacagccttccagagataaaaggccacaaaagcacccatgacatcgccgatccgataaagaataaagttgactcgataggtaatcaactcctgaacgcctgcattgataaagggtttataacgtctccacaatttgaccatcttagagctcctttcgatagaagcggcggataatatcttcaatatccgtatccatcatcttcaaatctcggacctcaaaatcagacagggtttgcttgataatgtcagctgactggtagcgggaactatcgaattcaatgttgagactattcccttgtctatcaattgtcatatccgaaaagccttcatagtgagaaaggagatgactttgacctggtagcagttcaaaagaaagagtcttcatctttccaaaggtttccttgagttggctcaccgttccatcaaaaatctcctgccctttgtctatcataaaaatccgatcacagagttgctcaatgtcgctcaggtcgtgagtggtcaagagaatggtggtttcttcctcctgattgatctgagtaatagcccgacgaatgttgtccttgaccgaaacgtccaagccaatggtcggctcatctaaaaagagaactttaggattgtgaagcaaggaagctgcaatatccgcccgcatccgttgtcccagcgaaagagttctcacgggatccttgataaagtccttcaaatccaagacttcattcaaaaagtccatacgcttatgaaagagcgagtctggcacatcgtaaatctcttttaaaaccgtgtaggtctcttgcagggccaaatcccaccatagctgggtgcgttgtccaaaaacaaccccaatatccttgacataatcttgacgattgtcctggggaatcttgccgttaatccgacaaaaaccagatgtcggttttaaaatccctgtcagcattttaatggttgtcgacttcccagcaccattagccccgataaatcctaaaatttgtccttttgggacctcaaaggtcaaatccttgaccgcttcaaaggtctgcttttcaggatgaataaaggagcgcaaagcccccttcaagcccggttccttaacagtcttcacaaaatttttctgaagatgttccacttctatcattgccatatctatctccctatgtaaggaatagcacttgttttttgactacaaatattctaaatccttactttctacaccttctcaatattattacagaagtctttacaccaatctattatagtccaataaaaactagaatgcaagcgtttgcttaaagtttatgaaatttgagatttctctcttaaagtgatatttttagtccaaaattctgatttaatagtctccttaaaacaccaaaaaacccacccaatgggtaggtttcatctgtattattcagctagattaagctttaccttctgaaccgaatacgtcgatacgttcttcaactgatgcttggatagcttttacaccgtcagccaagaatttacgtgggtcgaagagttttttcttgtcgtattctgcttcgtttgcttcgtagtcacgagcaaatttacgagttgcgttagcgaatgcgatttggcattcagtgttaacgttaactttcgcaacaccaagtttgatagctgcttggatttgctcatcaggaatacctgatccaccgtgcaatacgattgggaatcctggaacagcttcagtcaatttttgcaagtgatcaaggtgaagacctttccagtttgctgggtaaggaccgtggatgttaccgataccagctgccaagaagtcgataccagtttcaaccattgctttagcgtcttcgattggagccaattcaccatcaccgatgattccgtcttcttcaccaccgatagtaccaacttcagcttccactgatacaccatttgcatgagcaaattctacaactttacgagctttatcaaggttttcttcaactggaaggtgtgaaccgtcaaacataactgaagtataaccaactcggatacactcaagtgcatcttcgtagtgaccgtggtcaaggtggatagctactggtacagtgatacccattgattcaacaaggttagcgatcaagttgcgagcaactttgtaaccacccatgtatttagcagcacccattgaagtttggatcaaaactggagcttttttagcttctgctgcgcgcaagatagcttgagtccactcaaggttgtttgtgttaaatccaccaactgcataaccgttgtcacgagctgcttggacaaatttttgtgctgaaacgattgccattttatcaggcctcctgtatagttttatgggtcatcccatttacattgttcattttatcactttttgacaaaaaaatctagtttttcccgcagtttcgattgaatttcttctagcttcatctatgtaaaccctttctctccctagtcttaggcgattcttggaaaagctatgaagaaggtcaaacgattctccttcatctcaaaacgataaggtaatttttcatgttccaatagactcttgaccacaaagagccccatcccagaacccttggccttgcgactagcattatcagaaaaagactgagccagtttttcttgttcttcaggactacagctattctcgataaaaagttccccttctctctctccgatgcggaccaagccgcctggaatggagtgcttgatagcattgctgatgagattagacaggattaatttcatcacagatggatttagataagcctgctggtggttcaaactattgtcaatctgaagttctctctcctttgctagcaaagaataatcttgaactagactttgcgtcatctggaggagatctattatttccctatcatctcgcaattcctgcacagaagagagagaaagtatctggagaacgtggtgattgagctcatccacaattcctaaggctactcccagatagcggtctctatccttataacgaccgatattttctttcatgttttcaatcaggattttcaaactagctaagggtgttttcagttcatgggaagcccctcgtaggaattcgaccttcatcttttccagctggagaatagcttcattcttgtcatgcaagtccgcaatgacagtcaaaagatgctggtagaggctattgatttgttccttgagatcaccaatctcatccctagaatccacgtgcaatcgcacttgggcatccagttccatcattctacgagttactcgcttgatttccaaaatcggggcaacaatggtccgagcatagatataggctaccaaaagggaaatcagaaaggatgccagcaaggtatagggaagaaactggagactgatttgctctgcttccttttgcaaatccatggacgctaaaaactggagagtcatggtaccaccgtcctgcgttttcacctcgcgctcctcgataaaaagagaggttgtctggcgatctgtatccagaggaaggctgtcctttacttctaacttgtcctcggtcatctcgcccttgacggtccccttgatatcactagtctgagaatacaagtctaagacttgctcgatattctgcctatccttaccttctagggactgggcaatggctgtcgctttctgaccaatggtttcctgacgatgactcagataagtcgaaggaaaaagaaaataaatagccaaatgaaggcagataaccagaacactaaatatcgagaaggtatagataaatatctttgtaaataaacctgttcgtttcattttcgctccaatttataaccaacattgcgcacagtgaggatgcaatccaagtctagctttttccgcagttccttgatataaacatcaatgacacggtcaaagggaacctcatctgtcgctttccatacggcatcaataatctgagatcgtgtcaaggcccttccttcatttttaaccaaataatcaagaatttccaactctttagcattaacagccacttcctctcctgctaggcttgcactgtagctttcaaagtccaccttggtatccttataagagaagattcgtcccgtatcataatagcgcttgaaaatcgcgtccacccttacttttaagagggatagagaaaaaggtttttccagatagccatctgccagagaggcaaaggcactcatcttgtattcctcatcctgaaaggctgttaacatcaagacagggacttggctggttttgcgaatctcagctagcacttccagaccattgagcttaggcatctggatatccagtaaaaccaaggctacttcatagctggaaaatttttctaaagcttcttgcccatctgcagcctcaatggtttcataaccacaatccgtcaaataatcactgatcccctcacggatcatctcttcatcttctacaattaaaattttcatagaaaaaacgtttcacattcctttaaatttcttgtaaatcatctcaagttcatcctgaaagaaagaggccttatcaagataaaatagataaaaatgctacctatattataccccatttagaggagattaggtagcaagtttgttattcgctatccagcagaagctcttttggttgttttctaaggagattgcttgaagcaaacgccataacgagaaccactagaaccaaggcaaggacaaagacgatgataaagtctgatgtctgaatggaaatatctaggctcgacaaggtcttactaaagccatctacttctgcaccaccaccaaggttagaggcttgagcagccttgctagcttgcttggcaacacctgaagtgacattggtaagaacagtatttccgattgcacgcgctgtgtaagtagctaagaagtatgcagaaacaagagcagggatggcaatcaagatggattcagtgatgaattgacccaagatacttgcctgcttgagaccgatagagaggagaatacccacttccttgcgacgggcattgatccaaaggctgagtaagagggcaaggagaagaactgagaagctcaagctaccccagaagaggagattggccatcttgtacataccagaaatggattgctcaagagctgggtagttagaggagctcttaactaaagtatagctcttccagttgataccactgatgccattcaactctttcataacatcatccaagttcttgtccgctgttacaaagaaggttgcgtccccataaatagctgtgtcttctgtgtatccataaagttttgcagcagtgtgaatgtctgtgatagctgtattttcatagagttcttgtgagtaggttactgccgatttattgtgaccatcaaagagtcccttgattgtcacttcgactgtttccttggctcctttttcattgtctgcatcgtagatattagagtctagtttgaccttgtctcctactttccagccgtgtttggctgccaagtccttgtgcaggaggatcttgtccttgtcgtcgtttgttaggtgttcaccttcgaccagcttataagaaccagagacaaacttgtcttctttagaggagtcattgacacctgtaatcatcaagctacttccaaaatgtttagcacggtcaggtgtcagatttttcttagtttctggcgtttcgatgagttcatagccagtcaaatctccgatagcgttgatgcgtttcacataagactcaatggccttgttttcggtgatttttttgatatcttcacccttgatattcccagcaccacgtggcgttccttgattgacgcgacgattgatttgcatggagaagctgttggtgatatttttaaaggtctcctgagaagccttggcagtagctcccttgattgacaagccaaccaaactcaagctcgccatgaggagaataatcaggaagatgacaatcgatttgaaaaacttccttgtaacataggcaaatgcgttgtgtaacatagattccctttctagaatttgttctattttatagttctaacagaaaaagctcatattatttcgtcgtattgcgagtttcagtcagtttcttatctttcaactcaagtgtaatatctgatgcttgcgccacttctttgctgtgagttacgacgatgacacatttacctgttttctgggcaagtgatttgagcagttcgacaatatctccagcagttttagggtccagatttcccgttggctcatctgctagaataactggagcttctgagaccaaactacgagcaatggcaacacgttgttgttgaccacctgataactggagaacattccgcttgatctgactttcatccaaaccaagctcaagcagtgtatccttgctggcctttttgttgaccaagcggatattttccagtggagaaagataatctatcaagttataattttgaaagaccagggaaatatggtgcatgcgatggtaagaatagcccttcttacgaatatcctctccttgaaaaaggatagaaccttcaacaggactatctagaccagcaagtagggacaagagtgtggattttcctgctcctgactcaccaataatactgtaaaatttcccgggttcaaaattataattgatctgatataggactgcttcagcagtgttcttataacggtaggtaacatcttgtaattgtaataaagtcatgatttctccttcttaactaatagatgataaaatttctttcggcgattttctaaataagaataggaaacaaagggctacagataagcaactaatcaacaacagaaagacataggactctgcaaaagataataaactacttgatagaccacttgttttggctagtgtattttgtaagcttgcctgatctccacttgctagtagagtttggagtaggtaggatgtgattgcgtttcctgtagcaaatgctggaagcaaagctccgagagataccaaaaatacctctaaacagaactgcaggaaaatcgaactcttgccttttccaagtgccagaagaatccccacttcgtagacccgttctctcaaccagagagacaaaacaagaattaaggctcctgctcctgctatcataatcccataaaggaaaatggtcagaaaggtttggaaagttgcaaccgagtctttgatttgttcaaaagccttgttttccttttcaacttgatacccttgattttccaaggccaagttttctacctgcttcatgagtccgtccatttccttaggattttctacataaaagcgcgctgcactgactagagattcaccatttcccaaaaggctttggctactttcatagtctgtaaagacttggttttcactgaagtcagaagacaagcctgtaaatttctcttgttttttaccagaaaagatgccgacaatctcaaactccactgtttgccctttgccagcttctgactgaccagcatctaaggcaatcttgtcatgaagggaaagactattcttcttagccaactcttcgtggatgatgattttctttgaatcccctttttgaagatgtcgcccttcttttaagttgaaagccgagctggtaaaggtgacatccttagatgaatcttcaagagctgttaagctaaccaaattcttatccgcagcggacaaatcatcacgttccacgctctgctcgccactcactgcttccttgtcttttagttttgcgaccgtctcgagttcaggagaaacattttccagtcccttaatcttgcttacagatgctaggtctgacaacttgaatgtctgaccattttctatcttcttaatagaaaaagaggtattgagtgatttgtaaagattggtttcaactgttttgttggacttcatcagagtcaaacaggctgaaattccagccaataggaccaataaaatcagaaataaaataaaacttctcagtcgttttctgctgacataagcccaagctctttggatcggattcatttgtcacctccatatttgtaagactattataaaatccaaatatgaaatgtttatgaaatacaaaaaagagcaaaatttttttgctctacttgaattatatgaaaacaaaagagctagcctaagctaactcttatcctatgcggagagagggacttgaaccctcacgacctaaagcggtcacaggatccttagtcctgcgcgtctgccaattccgccatccccgcgtcgattactttactagtatatcaacttttaggatgcttgtcaacactttttttcaatttttttcatttcatcaaccaaattactctgaaaattcatttagattttcatctactaacttagctccgagtgtatttttgaaatgacctagggcaaattgatgattttcaggccagatagatgcaacagccggtttaacaatctcgatgtcatatcctagattataggcatctatagctgtatgcaggacacagatatccgtcaaaactccggttaaaataactgtagaaattcgacgctctctcaaacggatatctaggtcagtacccgaaaaagctgagtaatgacgtttatccatccaaaagacacgactgtctgaaccatgctcttgataaaagacccccaaatctccgtataaattccgtccactagtcccaatcaaattgtgaggaggaaacagcttgctttctggatggaaacaatcgttttcttcgtgagcatcaatggtaaagaagatgtaatctcctcgttcaaaagctagtcgagttaccttgctgatggcatccgaaatcgcctgagctggagcgcctgctgtcaattttccactatcagcaacaaaatcttctgtataatcaatcgaaatcaaagccttagtcattagtaatctcttttcttcacttcttcaaaaatatctgaaatcaaaaccttaaggtaggttcccttcattccaagtgagcgactttcaataatccctgcagactcaagtttacgaagggcattgacaatcacagaacgagtgattccgatacggtctgcaatcacagacgcagtcaactgcccttcatttccatttaattcccctaaaattgctgaaacagcacggagttcggagtaagaaagggtattaaccgccatggtaacagcagtacggcgacggatatttttctcatcttcttcacgctggaaattaaggagttgaattccaacaacggtactcgcaatctcaacaagaatcaagtcctcgtcttcgaattttttatcattgcgccaaataatcaaagaaccaagtcgaatccctgatacatgaatcggtgcaatagtcgtcaaaccatctggaaagtcggcacgactttccacaggaaaaatgcttaaatcatgatcaactgtcagattggcttctgtatcgtaaatcatgttcgcaccttgaatgtagtcatctgggaaaatcttagtttggaagaactgctctacacgatctgtattggttttgtaacgcataaaataaccaaggagacgtcccttgctattgacgatacaggcgttacagtcaataatatctgccaattgacgggtaatcgcattgtagggaagttcttcctgcaactgctcctctgagcgcttcaggatagaagtaatttttctagttttttctaataaatgtgccatttttcacctcgaatttaatcgctatcattataacataaacagcttgaattttcaattattatctgaaaattgcttatttaattgcaatttgaaaaaacaagaatatttttaattaaattgcttcttttctattgacaagccccttatttttgtgtattataatattacaagaagataatatatctattttatttatctttctttttccattcggtctccttatataaaaaagcgattcgttttgaaccgctttttcttatttatcgcccttgttacgaataacaaagcctgtttgcttttcacttgaagtattgcgtggttttttattatccttacgataacgtttttccttatcataacgatcatttccacgactgccgtttttgaaatcatcacggcgaccattgccacggcgttcgcgatcacgacggtcatctccacgacgacctcccttacctttaccaccgaagccattacctgatggtttaaatggcagtggtttttcacgcgcaatctccacttcaggaaggctatctggatcttggacagtcagactcaagatatacatggccaattcttctggagtaaattcagcagccaacttgcgagcatccttaccaaatttctcaaagttgccacggattgtctcatctgcaaaatcacgttcgattttcttgagtgcaacctgtttcttagcttggaaggcttcttctgcacttgcaggtttaagacctttcatgcgcttcttagtcaagttttcaataatttgaaggtaacccatttcgtttggagcaacaaaggtaatcgattgacctgatttaccagcacgacctgtacgaccgatacggtgaacataactttcaggatcttgtggaatatcgtaattatagacatgagttacacctgaaatatccaaaccacgcgctgccacgtctgttgcaaccaaaacatctagattgccgtttttgaagtcacgaaggacacgaagacgtttgttttggtctaggtctccatgaattccttctgcacggaagccacggattttcaaaccacgagtcaattcatctacacgacgtttggtacgaccaaatacgatagcaagttctggttgttccacatccataagacgagtcatggtatcaaatttttcttgttctttaacacgaatatagtattggtcaaccaattctgttgtcaattccttagcagcaatcttcacatgctcaggttctttcataaactgaacaccaatacgtttgatggcatctggcatagttgctgagaaaagtaaggtttgacggttttcagggacacgagaaatgatagcttcgatatcttcaaggaagcccatgttgagcatttcatccgcttcgtcaaggataagagtttcaatatcttgtaatttcaaggccttgcgtttaatcaagtccaagaggcgacctggagttcccaccacgatatgggcaccagatttaagagccttaatctgtttttcaatgcttgatccgccatatactgagcgtactttgactcccttactacgaccaaatcggaagagttcttcttgactttggacagctaattcacgagttggagcgataaccaaagcttggatggtcgcttcttctgtacggattttttcaagggttggcaagccaaaggctgcagtttttcctgtaccagtctgagcttgaccgataacgtccttgccttcaagggccaagggaatagtttgttcttggataggactggcttctacaaaaccagctttttcaatctctgctagcaaatcagcagacaagtttaattcattaaatttcacgttattcttctttctaaaggtggtgcgaagccaccctataggacttagtttatacttttctttttatgacgtattttcatatactggatataaaatcgtgttgcttcttttccacaaaagaaaagtactgttttctttgcaacctatctagtataacacaagagagaagcaaaagatagcccaatccatcgataaagtcatgtaaacgatttttctgagaaaataaagttaaactttccactatttcataaacttttttaaagcgtagcagaattgtgcaaaagtttttttcttgtgctagaatgaaattcgaataggaggaactctaaatgttaacttatgatttaatcgttatcggatttggtaaagctggtaaaacactagctggtaaattggcttcagctggcaaaaaagttgccctcattgaacgtagcaaagctatgtacggtggaacttgtatcaacatcggttgtatcccaactaaaactttgctggttgctgctgagaaagacttgtcttttgaagaagtgattgctaccaaaaacactatcactagtcgcctcaacggtaaaaactatgcgactgttgctggtacaggcgtcgatatctttgatgcggaagctcacttcctttcaaataaagtcatcgaaatccaagctggtgatgaaaagaaagaactgactgctgaaacaatcgtcatcaacactggtgctgtttcaaacgtcttgccaatccctggacttgctacaagcaaaaacgtctttgactcaacaggtatccaaaacttggacaaattacctgaaaaccttggagtccttggtggtggaaatatcggtcttgaatttgccggcctatacaacaaacttggaagcaaggttacagtcctagatgccttggatactttccttcctcgtgcagaaccttccatcgcagctcttgctaaacaatacatggaagaagacggtattgaattgcttcaaaatatccgtactactgaaatcaaaaacgacggtgaccaagtgctcgttgtgactgaaaacgaaacttaccgtttcgatgcccttctctacgcaacaggacgtaaaccaaacgtagaaccacttcaacttgaaaatacagatattgaactaactgaacgtggtgctattaaagtagacaaacattgtcaaacaaacgttcctggtgtctttgcagttggagatgtcaacggtggccttcaatttacttacatttcacttgatgacttccgtgttgtttacagctaccttgctggagatggcagctacacacttgaagaccgtctcaatgtaccaaatactatgttcatcacacctgcactttcacaagttggtttgactgaaagccaagcagctgatttgaaacttccatacgcagtgaaagaaatccctgttgcagcaatgcctcgtggtcacgtaaacggagaccttcgcggagctttcaaagctgttgttaatactgaaacaaaagaaattcttggagcaagcatcttctcagaaggttctcaagaaatcatcaacatcattactgttgctatggacaacaagattccttacacttacttcacaaaacaaattttcactcacccaaccttggctgagaacttgaatgacttgtttgcgatttaagttgagatttaatcgtatcgaacatccctctttgggctgtttttacttctgcggaacctcaaatctgtcttttccttcttttatgatataatagaaacatgaaattaaaaactactttgggccttcttgctgggcgttcttcccacttcgttttaagccgtcttggccgtggaagtacgctcccaggaaaacttgcccttcaatttgataaagatattttacaaaacctagctaagaactacgagattgtcgtggtcactggaaccaacggaaaaaccttgacaactgccctcactgtcggcattttaaaagaagtttatggtcaagttctgaccaacccaagcggtgccaacatgattacaggaattgcgacaaccttcttaacagccaaatcttctaaaactgggaaaaatattgccgtcctagagattgacgaagcaagtctatctcgtatctgtgactatatccagccaagcttatttgttatcactaatatcttccgtgaccagatggaccgctatggtgagatttacactacttacaagatgattttggatgctattcgtaaggtacctacggctactgttctcctaaatggtgacagtcctcttttctacaagccagctattccaaatcctgtacagtattttggttttgacttggagaaaggtccagcccagctggctcactataataccgaagggattctctgtcctgactgccaaggcatcctcaaatatgagcataatacctatgcaaacttgggtgcctatatctgtgaagactgtggatgtaaacgtcctgatctcgactatcgcttgacagaactagttgagttgaccaacaatcgctctcgctttgtcattgacggacaagaatacggtattcaaatcggtggtctctacaatatctacaacgccctagctgcggttgccatcgcccgtttcctcggcgcagattcccaactaatcaagcagggatttgataagagtcgtgctgtctttggacgccaggaaaccttccatatcggagataaggaatgtacccttgtcttgattaaaaatccagtcggtgcaactcaagctatcgaaatgattaaattagctccttatccatttagcctatctgtcctccttaatgctaactatgcagatggaattgataccagctggatctgggatgcggactttgaacagatcaccgagatggacatccccgaaatcaatgctggcggtgttcgccattctgaaatcgcacgtcgtctacgagtaactggctatccagctgataaaattactgaaacaagtagtctggaacaagttcttaaaaccattgagaaccaagactgtaagcatgcctatatcctagcaacttatactgctatgctggaattccgcgaactgctggctagtcgtcagattgttagaaaggagatgaactaatggtttatacttcactttcctcaaaagatggcatttacccttatcagctcaacattgcccacctctatggaaatctcatgaatacttatggggataatggcaacatcctcatgctcaagtatgtggctgaaaaactgggggctcatgtgacggttgacatcgtttcacttcatgatgatttcgatgaaaatcactacgacattgcctttttcggaggtggtcaagactttgaacagagtatcattgcagacgacctacctgctaaaaaagagagcattgacaactacatccaaaacgacggtgtggttctggctatctgcggtggtttccaactattgggtcaatattatgttgaagcttcagggagacgcatcgaaggactaggggtcatgggccactacacgctcaaccagaccaataaccgttttatcggggacatcaagattcataatgaagatttcaatgaaacctactatggatttgagaatcatcagggccgtaccttcctctcagatgatcaaaaaccactgggacaggttgtctatggaaatggaaataacgaagaaaaagtcggcgaaggtgttcattataagaatgtctttggttcctacttccacgggcctatcctctctcgtaatgccaatctagcttatcgcctagtcactactgccctcaagaagaaatatggtcaggacattcaactccctgcttatgaggacattctcagccaagaaatcgctgaagaatacagtgatgtcaaaagcaaggctgacttttcttaaacaaaggaaaatgatatcaaagaactccgttatcttgtcggagttctttttgtctgttcttttacccttctcccttgcattttctctcattttttgccaaaatagaggggtagaaagaaggtagcatatgtctaaattacaacaaatcgtaacatatcttgaatcagaaaaactagacgtcgctgtcgtatctgaccccgtcacaatcaattacctcactggcttttacagtgatccccatgaacgccaaatgttcctttttgtcctagcggatcaggaacccctcctttttgtcccagcccttgaagtggagcgtgcgagcagcactgtttccttcccagttgtgggctatgtggactctgaaaatccatggcaaaaaatgaaacatgctcttccacaacttgacttcaaacgtgtcgctgttgagtttgacaatctcatcttgaccaaatatcatggcttgaaaacagtttttgaaactgctgagtttaacaacctcacacctcgtatccaacgcatgcgcctcatcaaatctgctgacgaagtgcaaaaaatgatggttgcaggtctctatgcggacaaggctgttaaggttggctttgataatatttctcttgataagacagagacagatatcatcgcccaaattgactttgctatgaagcgtgaaggttatgaaatgagctttgataccatggtcttgactggtgataatgctgcaaatccacacggtattccagcagctaacaaggttgaaaatgatgctcttctcctctttgaccttggtgttctagtcaacggctatgcgtcagatatgactcgtacagtcgcagtcggcaaacctgaccaattcaagaaagatatctataacttgactcttgaagcccaacaagctgctcttgactttattaaacctggtgtgactgctcatgaagtggaccgcgctgcccgtgaggtcatcgaaaaagctggttacggagagtacttcaaccaccgtctcggtcacggtatcggtatggatgttcatgaattcccatctatcatggaaggaaacgacatggtcatcgaagaaggaatgtgcttctctgttgaaccaggtatctatatccctggtaaagtcggtgttcgtattgaagactgcggtgttgttaccaaggatggctttgacctctttacaaacaccagcaaagacttgctgtattttgattaattttctttgaaaatcttcccacaataaaacgcatagtatcaatctttcaacacctgatactatgcgtttttcttatttgaaatacttttgactcagcctctttacttaatcttcttgatactttgactaagcacaaatcctacaatcatccctaccatattttgcatgaaatttggtaaaatttctggtagagctgcagcccagccattcatcaaagtagaacccaaggcgtaaccccctaccatggcaatcgttgctaagataaggcctaaccactgagtttttcctttaaatcctgcgaaaaatccctgcaagccatggttgaccaagctaaagaacatccactgaggatagcctgataagaggtcaatcaagaaacctgctagtcctcctactacagccccttcacgactaccaaagtaaaaggccgtaaagaaaacacccgcatctaagagagttagaattcctgtcggtgttggaatttttaagaaatagcctagaaccacagagagagcggttaatagggatacaagggcgattttagttgttttggtttgcttcatattgtcttactccatactgatctgcttgtgcaatggcacggtaaacgaaagccttagagctttctactgctggtaaaagttcatcacctttgactagatgactggcaatgctggaagcaaaggtacaacctgcaccagcattttgcccttggatgacaggattttctaggactgtaaagttttgtccatcataaaagacatctacagccttgtcctgactaaggcgattgcctcctttgataatgactgctggcgctcctaaggcatgtagtttctgtgctgctgtcttcatgtcttccaagcttttaatttcttgaccagctaataattctgcttctgggaggttaggtgtaatcacactgacatgagggaaaaagcgaatcaactcttggcatagttcacttacagccacgtcgtgcgtttccttgcagaccaagacaggatccaatactacaggcactcctgggcgttgtttgataaagtccaatgccttctcagccacactgacagttggtagaagaccaatcttaattcccccaaactcgacatcacgcaagctatctaattcatgttgaaaaatggtatcgtcagttggaaagacttcaaatcctttttctgtcaaggctgtcaagcaagtcactgctacaaagccatgcaagccgttcaatgtataggtagctaaatctgctgacaaaccacctccactaaaaatatcattcccagaaagtgctaaaatacgattattcttcataacgaatctcctttaaatacaaaccattaggtgctgcagtgggaccagcaagttgcctgtcctttttctccaaaatcaagtcaatctgctctactggcatacggttgtttccgattttgagcagcgtccccaccatattgcgaatctgcttatacaagaaaccatttcctgaaaaggtaaaggtcaaaaattgtcctgtctcatcaaccctgagactagcttctgtgatggtgcgaaccttatcctccacactggttccagaggctgtaaagcctgtgaaatcgtgggtgccctctagctttttgacagcctcctgcatccgttccacatcaagcggatagggaaagtgagtagcatagtgacggcgcatgggatttttaggacgacccctatccacaataaactcataggtcttgctgtgcttggcataacggcaatgaaaatcatctgccacaagctcaatcgaaatcacatcaatatcttcaggtgactgagtgtctagagcaaaacggagcttctcctcatccatttgataaggcaagtcaaaatgaatgacctgtcccaaagcatgaactccactatcagtcctaccagcaccgtgaacagtgattgctttccctttattgagtcttgtcaaggttttttcaatttcctcctgaacgctccgcgcatgggtctggcgttgaaaaccagcaaaggcgtaaccatcataggaaatagttgctttgtatcttgtcataacttctattttatcaagaaattagtctgtagacaaggtcctaaagtaaatactgtatgggtacaaaaattctaaaaagaaaaacttaggaaccaatcctaagctctcttttgaagtaggtgcatgacaaagatagaagttacaatcaaccaaactcccaaaattgtaaagaccagcatcccattgtgagttaataagccaattgcacttagaacgaatggtgtcgtaaaggctccgaaactacagcctaatacagcaaatgaagttgcttgattgaggagtttagctggaattctttcagagacaagttgaaaaactgtcgtcaaggctacactgtaggcaaaaccagccagaatgcttcctgccactaccacccacaaggatggagataaggcaatcacaatttgccccaaaccaaaggtaataccggaccagagaagcaatttctctttaaagatagaaatcaagaaagagaaactcacaccagccacaatcccgatcaactgcatgacactaagaacaaaactagataactgggcatctccaagtcctctttccaccatcaaacttggaatacgaatagtaatagccgtattggtacaaactacaaccgccgcttcgatagctaggataaaaatcaaacctttcatttcccgagttaagcgacttgcttctttctcttttttcttgacttctttcttttcttttccataagggacaaagagcagataaagggtcagcaccaaaaatccagcactataggctaggaaggtagctgtccaaccaaaggccaacaactggccgactgccaaggtaatgagagaagccccaacgacctctgcagaaccgcgtaaccctagcatctgtattctcgtttttccttggtaacgttcactgataatagaaatggccttagcattaatcatcccaacacccaaaccaaaaagaatccgtgttccaaaaacaaaggggtaggcttgataccagaagggagccgtcccgctgagtgataaaatcagcaagcccagactaatctgtaagcgctcaggaaatattttttctaagaaaccatttagtagtaacataatcatgatcccgaaagaaggcaagctcgccaagagttcaatttgttccttaggatagccttgataatagtcaaacatggctggcagggcactcgagatggaaaaggatgtaatcaaaacgagggagagagccaaaatactggcccgttctaaaaattgtttcatgaaatctctttctatattttctcttaatcttctacttttttgatagtcatcaaacaagcaagaaaagaagaagcctctttagtgtacagactccttcttaaactcgaaaatgaatcccttgtgtcttaggatgattttctcttgatttgcttaataaagtagaagataaatcctgccaccatataagcaacaaagataatcagacaccacttgaacacgacatcccaacccttgttcacattcaaaaagaagtacgggaagggactgaccttagaattaggaacatcaagtttcaataccaagccattaaaaagagcaaaaatcatatacagcaagggtaaaatcgtccacacaattgggtcccaaatcttgtattgaccctgtttgtcaaaaaagagggtatctgctaaaaaccagaggggaacgatatagtggcaaaggaaattttctagagtatagaaattagtcgcaataggcgctaaaaggaaatggtaaatcacacaggtaatcatgatactcatggtgaccccaccttttaagcgcaagagacttggtctttgccagttttcacctaaacggctcataacctttaggagatagagcgtaaaaatcgcgactaaaaggttggacagaaccgtataatagagtaacatcccaaatccaccatgcttggcgatttcaagataaactcccgtaaaagccgctagaaacaagaagatacggctataaaatacaagtttatagtgttttgacatgcttaaattttcttcacaaactctgatttgagtttcatggcaccgaagccatcgattttacagtcgatattgtggtcgccttctacgatgcggatattcttcacgcgcgtcccttgtttcaaatcttttggcgcaccttttacttttaagtccttgatgagagttactgtatcaccgtcagccaatttattcccgttggcatcgatagcaacaagaccctcttctacatctgcaacttcagcaggattccactcataagcacactctgggcaaaccagtagggcaccgtcttcgtagacatactctgagttacattttgggcaatttggtaggttgttcatggtttctccttatcatcattcactattctttgaaaatcaaaatttctcgaacagcaactattataccttaaaatcagcattttgacaaatatagaaaaaaaccgatatcaatctatcggcttttctacatctacattctttttttagcttctgctttgattttttcaactacttcttgaatgttcaagccagttgtatcaaggtagacagcatcctctgcttgtttgagaggcgaagtctcacgatgactatccttgtagtcacgcgcagcaatttcctcttttagagtttcaaggtctgtttcaattcccttggcaatattttccttgtaacggcgctctgctctttcatctaccgaagctactaggaaaattttcaattctgcttgtggcaatacaacagtcccaatatcgcgaccgtccatgacaatcccaccttgctgggcaatctcttgttggagagaaactagtttctctcgtacttcaggaattgctgcaatagctgaaacatgattggtcacttcattttcacggataggatgggtaatatccacatctcctacaaagacaagttgttctccagtttctgagcgtccaaaactgattggatgctggtccaataaggctaaaagttcttcaacttgttcaactcctaattggttcctgagagccatgtaggtcgctgcacgatacatagcacctgtatctaggtaggtgaatccaaaatccttggcaataatctttgcgaccgtactcttgccacttgaagcaggaccgtcaatagcaatttgaatcgtcttcatttatgactcctatctagtcttaatcacatctccaggattagcaaaccaagatcctgtagccatatggccaggattcaaagcctctaactgagcaatcgagattcctgcacgagcggcaatagctgcttctccttctccagccataacttttgtagttccttctggatcagttggatgttctgagctactagatgactcttctaccttctcctctgaactagaagatgcctgctctgaactactactagaagtagaagaaacttgctctacttttgtatctgaatcgtgaaaatctttcaaggctgctgtgcgattactcccacccgatgaaagatagataagaacaataatcatcacgactacaatcacaaagaaaatacttgctaaaatagtcaagatacgattagccagcactcctccaccttgttctctcttacgacgttctgatcttgtttcttcctgattctcataaatatcttcttgccacggttcttttgccataccttactccttggttttttttacttttcttattacaatataaatatgaaaatcacacttatacctgaacgctgcattgcctgtggtctttgccaaacttattctgaattatttgattaccacgataatggaatcgtgcgtttttacgatgaccctgaccaactagaaaaagaaatctctcctagccaggacgtcgtagaagctgttagaaactgtccgacacgtgccttgattaaagattaactctaatatcgacaagaacgttccactccttctagtttagcatatttccatgcaaaattatagtcttttctctttatttttttctgtaaaatcaggaaggtcacttttttctttgacgagataaagtggtctttttttagtctctagataaatcttactaatatacttgccgagaatcccaatggtcaagagttgaatccctccgagaaagagaataacagccatcagagaggtccaacctgatgtcggattgcccaaaatgagagtccgaaccacaacaaaaaaggtcataagcagagaaataaaacaagataggagaccagccacaaaggcgataatcaagggaaaatctgaaaagttaacaatcccttcaatggagtagaaaaagagttgcctaaaactccaactggtcttgccagcctgcctttcgacatttggatagtccagatagtgggttttaaaaccgacccaggcaaagagccccttcgaaaagcgattggactcagtcaagcttaaaatagcatcgactacagatcttctcatcatgcgaaaatcacgaacacctgacggcagggctactggactaatttttttcatgaaaccataaaagagatcagcacagaaactgcgaaagaaaggttctccctcccgactagttctccgtgttccaacacagtccaagtctgcattttggtctagtaaatttttcatctcaagcaacatactcggaggatcctggaggtctgcatccatcacgaccaccagatctcctgtcgcatattgtaagcctgcatacagagctgcttctttgccaaaatttcgagagaaagaaatataatgaactgccgaattttgctcccgataggtctttaagagttccaaggtcccatcacttgatccatcgtcgacaaagacatactcgatttctgtttccaaatctggaagtaaagcttccaaagcctgataaaaaagaggaagtacttcctcttcgtttaaacaggggacaatgattgacatcaccatcttagtcttcaaatccatttggatgcttgctttgccaacgccatgcgtcttcacacatttgggtgatgcctaattctgcttcccagcccagttctgctttggcttttgcaggatctgaatagcaggctgcgatatcccctgggcgacggtctacgatacggtaaggaattggacgtcccaccgctttttccatgttttggataatttcaagaactgagtagcctttacctgttccaaggttataaacgtttaggcctgaacctttttggatttttttcagagctgcgacgtgacctttagccaaatcgacaacgtggatatagtcacgaacaccagttccgtcttccgtatcgtaatcgtctccaaacacttgcacttgctctaattttccaacggctacttgagtcacatatggcaagagattgtttggaataccgtttggattttctcccaaatctccgctctcatgagctccgattgggttgaaataacgaagtaagaccacattccattctgagtccgccttatagatatcggtcaaaatttcctctagcataagcttagtacggccgtatggattggtcactgaaagtgggaaatcttccaagattggcactgtatgaggatctccgtaaactgtcgcagaagaactgaaaataatgtttttacagttgttttcttccatgaccttcaaaagactaacagttccagcgatattgttgtcatagtaggcaagaggaatacgggtagattcaccaacagccttcaaaccagcaaagtgaatgacccctgttggttcttcttgcttgaaaatatcacgaagagtatctgtatcacggatatctgcctcataaaacggaatttcaactcctgtgattctttcaacaacttctaaactttttctattactattcacaaggttatccaccacaacaacctgatgacctgcttggattaactcaataacagtgtgggttccgataaaacctgctccacccgttaccaaaatcttttcttgcatcttttttcctcgattctcggattattttttcttattttaccatttttgatagggaatgtcatttgccatcctagagggtaggataaaatttcagtaaaatgcttatactctttgaaaatctcttcaaaccatgtcaacgtcgccttgccatatatatgttactgacttcgtcagttctatccacaacctcaaaacagtgttttgagctgacttcgtcagttctatccacaacctcaaagcagtgctttgagcagcctgcagctagtttcctagtttgttctttgattttcattgagtattattcgctttttactcgtttgacatagttttcaattgggtagtttagagggtccaaggtcaactccttgccttgaatcagttgagctagatggtagccaatgataggacccgttgtgaggcctgatgaacctagtccactggctgaatagacacctgacaattctggaacctctccaaagaaaggagagaaatcactggtataggcacggattcccacacgttcaccagatgatttcgcttctgccaaggttgggtagtgaggcaaggctgcctcctccattttctggagtaaagtttcatctaccgtcaaatcaaatcccatgtcattttcatgagtagcacctaaggacaatttcccacctgcaaaaggaatcaaatcccactccccttctggcataacaacagggtaagcttccatgtcttgggccagctgataatctcggagttgccccttttggggacgaacatctacttcataacctaaaggctctaacagatgtcccaaccaagctcccgtcgccaaaataacctgatcaaacacctcttcgtcaatctggtaacccgatgttaaaggtgtcagactcactttttctttgaccagcttgacctgactggcttctagcaaacgagtcaccaagagttgaccatctactctcgctccaccagaagcatagagcagacggtcaaatccctgcaaaccagggaataattcgttagctgatgcttggtccagaatggctaaccggcctatcaaaggagattcttctctacgctggagggctagttgatagagttcttccaacttagttttatcctttttcaggagaaagactcccgaacgctggtaaaagtcaatttctttccctgacttcactaaatcagccaacaaatccacataaaagtcagcccccaagcgcgccattttgtaccaggctttattgcgacgtttggaaaaccaaggactgataattcccgctgcggccttggtagcctgaccttgtccatggtcaaagacggttacttctaggtcactttctttagagaggtagtaggcagctgttgctcccacaattcctgctccaataatggcaacttttttcattgttttcactttctaactagatatggtggaaaggattggtcgatgcttgactaggtacaatatcaattgtccagccattttcagccttccattgagtaaggagtgcagaaattttttccacaaaaagcacttcaatatagtgacctgggtccaatgccaacaagccatcagacaacatatcctgggcagtgtggtagtaaatatcaccagtgatatagacatccgctcctttagctaaagcatccttatagaaagactgcccgctaccaccacagatggccactcttgaaataggattctgcaaatctctctcttgataatgcaccaatcgaaggctatctagaccaaagacttgcttgacatgttgggccaattcctcaaatgtctgaggttgaatatttccaatacgtccaatcccacgttcagagcctgtttcctgcagataagtcgtttcctcgatacctaacatctgacagaaccagtcattgagaccattttcaacgatgtcaatattggtatgacttacataaactgcaatgtcatgcttgatgagatcaatgtaaatctgattttgtggacggctagctaccaaatccttgatgggacggaaaatcggcgcatgcttgacaataatcaagtctacacccttttcaatggcttcaaccaccgtttcttcacgaatatcgagagccaccatgaccctttggatatccttgtctaaagtaccaatttgcagaccacgactgtctccctccatggaaaattcctgagggcaaaaggcttcatacgcattaatcacttcacttgctaacatggagaacctccttgatggcttgaattttatctactagaacttgacgttcttccagatttttttctgggatttgtccgagggcaaactctagcttaacagcttctttttgccatttttggacaaagactggactgacctctttggacaagaagggaccaaagcgaacatcactagctgatagcttcatttgtcctgcttccaccaccaaaatctcgtaaaacttgccagcctcttctaagatactttcagctacaatctgaaattcgttctcttgtagccagatacgcaagtcgtcttcacgattattgggttggaggattaaacgctctacattagctaacttgtccaagccttcttctaaaatcctggcaatcaaacgaccacccataccagcaatggtaatgaccgataccttatctacctcttcaaaggctgccaagccatttgctaaacggacttggattttctcctttaacccgtgactttcaacatttttaaccgcggactggtagggaccttctacaacctcacctgcaatggcacttttgatttgtcctctttcgaccaactcgataggcagataagcatggtcactccccacatctagtaaaatggctccctgtggcacaaaggaagccactaattctaatctctttgaaatcatcttctctcactttccaaactctattacctcttattataccacatttcagctggcaatcttgtacctaaaaagaccgcaatccacagattgcagcctttctttattttctagcttggtagcgactggtcaaaatgaaaatcacggtaaagaccaacatcatgacaccataaacaggtaatgtttgtcctgttaaggttgaaatttcaagtagtttttgaattcttgggaagagagctgtagctaggaagcctcctactgaccaaacaatcaagaggacacgccatagggtaaatggcatgcaggctctaaatacggataagaaaccaattgaccccaagagataatagagtagagttgagatttctaactcagaccaaccttggctacttccaaatattttcacaaaaagaacgctgaacacaaccatgagagcacttggtagagcacgaagcatggatcttctgaggaagtttggctcaacaggtttgatatttcgctcaaaagtcagaacgaatggtgggaaaccttccacgaactggtcaatcatggtaatctggatcggaatgaaagggaagatcaagatccactcagatcgtcccagaagagcactggcgatacagataactgcgagcaagaaagaatagatggtctttatcaagaaaatcggggcgatatgggcaatgttattgaccacgcgacgaccttcaaagagaatctcaggaacatcattaaagtctgagttcaagagaaccagattggcaatctgacgcgtcgccggatccccttccgccatcacgatagaacaatccgcctcacgaagggcgagaatatcattgactccgtctcctgtcatagctgttgtatgccccgcttttttcagtgtttggataatgagtttcttttgatgaggggaaacacgtccgaaaatagctgtctcctcagccatagtaatcaattcctcatccgtgattttcgagcaatctacatagctatgatagtccgcaaaaccagccttctgggcaatactggacaccgtaactggattgtcaccagagatgatcttgagacccacttcctgagaacggagatagtccaacgtctctgctgctccctctcgaatcggatccaagatttccagcagggccagagcctgaatatcagatggtttctgtggcttgtgatggtctaatttctcctgactgagtgccaagaccaagacacgtgatcctctctctagagcctctctggcttctgggacctcagaagccagcaacatctcaggcgcccctaaaaaaactgtccccaaaccttctaactctatggctccccacttgcggtcgctagagaagggaagattggaaagcataggataggctacctgaccttggaaacgctggcgaatagcttgagctgttggattcttatcctcactatgggccatatagcttgtcaggatgctagcaatagcctcgtcaccataagtttccgtcaacggaagaacagcctctacctgcatctttccttgggtgatggtgcccgtcttgtccaaacagagcatatccacacgcgccaaggtttcaacagagtacatctcctgcaccaaaacctttttcaaacctagcttgataactgcagtcaagagcgaagtaatggtcaaaagggcaattcccttaggtaacatccccaaaagggctgtagacgagtttacaacggacgacttaagaggcaagccttttaacatcaaggcttctagcaagagagccagaccaaaaggaatgataatctttccagtaaaacctgctaacttgtccagcgatttcatgatacgagagttgattggtttaacggtcttggcttccagcatgagtttggcagcatagttatcagccccaacatggtgaacttgagccaaaactgccccactagccaagaaacttcctgacaagagcaaggcatccacttccttttgcaccaaatcactttctcccgttagcatggcttcattaacctccgtaaagccttccaaaaccaaggcatcactaggaatctgctctcctgcagacaaacgaatgacatctcctaacaccaattcttcaggattcagagctacttcttggccatcacgaatggttttaaccttttccttggtcatgagattgagcttgtccaccatgtgtttagcccgcagctcggtcacaattccagaaaaagcgttaaagcagataacggcaaagaagaccagattgctccaagcttgcacaaaggcaagggccaaagcaatggcaaagttcaaagcgttaaaaagggtaaagacatttcgtttaacgatttgccaagtgctggtactggccgaagcagtaaaatcattgaccaagcccttagcctgtctttcctcgacttctatttgggttaatcccataatcttatttttatccataaattctatcatatcattttttctaaaagaattctaatctcaccccaaatatgcacctagtcaagggaaaagtttgccagccctcctttgataaggtataataataacaagaaaataatcgaaggagatcgcatgttttatacttatttacgtggattggttgtcttgctcctatggtccatcaatggcaatgcccattatcataatactgataaaattcctaatcaagatgaaaattatattttggttgcacctcaccgcacctggtgggatccagtttatatggcctttgcgaccaaaccaaaacaatttatctttatggccaaaaaagagctctttaccaaccgtatctttggctggtggattcgtatgtgtggtgcctttcctatcgaccgtgaaaatcctagcgcctcagccatcaaatatcctatcaatgttcttaaaaaaagtgaccgctctctcatcatgtttccaagtggaagccgacactcaaacgatgtcaagggtggcgtagctctgattgccaaaatggccaaggtccgtattatgccggttacctacacaggtcccatgactttgaagggcttgattagtcgtgaacgtgtcgatatgaactttggaaatccaattgatatctcagatatcaaaaaaatgaatgacgaaggcattgaaacagtcgccaatcgtatccaaacagaatttcaacgtctggaccaagaaacgaaacaatggcacaataataaaaaaccaaacccactctggtggcttatccgcatccctgccctcatccttgccattatcctcgctatcctaaccatcatctttagctttatcgcaagctttatctggaatccagataagaaaagagaaaaacttgcttaaataaatacaacaatcccttggcaaaagccaagggataaattttttattcgattttccatttttgggccaaccagctagaaaaagctagaaatcgttcagctacttgttcatggtgtccataagggtcaaagacaaactggccgttcggatagcgtttctgaagactggtatggatctgctcagcatagactggtgcttgagccaagcgattagtgtggtgttctccttctgtttgaccattctgtaaatacagcaaacagtccaaatttttcacattttcttccttgcagtaggtcacaaaatcaggataccaaaaggaaccgcagatcgaaaagacacaggaaaccttgtcaaagctgaaaagactgtagactgctgccaaaccacctagtgagtagcctccataagcaaggcgtgcttcatccagtcgataaagcgactgcaacttgtctaaaagacctccaaataaatgatcatgataggcgttggcctgacctccaaaatctggagctccatctctcagagctgctaccttccagggagtgtagtcatctaggcgatttttagaggtcaagcccactaaaatcacagattcggaaagggaagataggaaatccaagtttccatcattcaataaaatagtcggataggtttgattggggttgtagttagagggaaggctgattttgacttgaattccttcccaatcaaactcattatttattgataaagtcattgattttctcaagggaatcaatcacagctgggccataatccatcaactcatcgtaagagatagtcatgattttttgattcttaatagcaggaacaccttccaaaacagcatttgccttcatcaactctactgcgttagcatccaattttttattacggtcactggttacatagataattaactcaggatccattgacacgagattttccaaggtcaagcctgatgtccccgtagcaacgtttgtataaccaagttggttcagcaaactctcttgcaaagcagacttgtaggcaccgaaggtttcatcattataagcaaccataatcaaagcctttttcttttcaccttggcttgctggatttgctttcttaacagcgtcaattttagcttgtaattgggctgcgtattcattggccttgtcctgaacattaaaaatcattccaagatttttgacatcttctacgatattccccaaatcttgctgaatcgttgagagggaagctttttgcgtataaactgggattttattttcattccaagtgctaactgtccccaaggatttttcagaaaacatcatgtttcgacccatcaaagcgtctggttcataagaaaggactgtctcttgtgagactgtttttttatccccaatttgaggaatcgtcgcaatcgcgtccttgtatttgtccgtcacagcattgtctggattgagcatgccaacaattttatccttcaaccctaactccaataagatttcagtggttgaaagattattggtgataactttttcaggtgccttgtcaaaaacttgttcgacttcatttcctttagcatcataggttttgaccgttaacggataagtcgtctctgcgctggccttctgacttgtttctgtgctagattgtgtggtagctttttctttagtagtattgccacatgctgccatggttagggtagctactgttacgagtaaaatgctgagtgtttttttcatcttgttttccttttcattcttataaatagtgaatcatggcttgctgatcctcggtccaagtaacctgactttgaactccgtatacagtttgcaatgactcaggggtgatggtctcctttggagtcccttggtaaaggatttctccctctttcatcagatagagataatccgaatagcgacaagcaagttgaatatcatgcaggacagctagaacattaaccttgagatttttcacaatggccaacaagtctagctgatacttgatatccagatgattggttggttcgtctaggagtaagagagtcggttcctgcgccaaggcgcgagctaacaaaactcgctgtttctctccccctgacagagacgaatagagacgagttttcttctcaagcatatccaccttaacgagagcatcttgaacgagtgtaaaatctctttccctttccttctctaaaaaagagaggtggggagttcttcccagcaagacgatttcctcaactgtacaatcaaactgcagctggttaaactgggtcacaactgccatttgcttggctgtttctttgagtgaccaatgatccagcggctttccatctaggcttatcaagcctttgtccgccttttcctgacgatagaggagtttaagtaggctggtttttccacttccatttggccctaatatcgtgtgaaattgattcccttcaactttaagagaaactcccttgaggatttttttctctcccagtccaaagtgaatatcctgacaaatcaaatccatatcagcccctcacctcccttcgcctacctccgacaatgtagataaagaagggagcacctactaaggctgtgaaaataccaataggaagctctgcatttggaataatgacacgagagagtacatctgcccagacgacaaaaagggcacctagcaaggttgcaacaggaaaaagcctcttgtaattcgttcctactaaccctcgagctaaatgtggagtaatcagaccgacaaatccaataatcccacaggttgccactaagactgctgtcagcacagccaccatggtcacataaagataccaataaaagcgtaagggaatccccaaagttaaagcagcctcatctcccatcatcatcgcattgaaaacacgatactgagtagagaaaaatagaaaggctattcctactactatagttggcaggaccaagtctgcccaggaagtcccagcgagcgatcccatggtccaaaacttaatggtcatcacactatccgcattagcgccaattgagataataaagtttgaaaaagccagaaagagagcattgaccacggttcctgataaaatcagactagaagtcgtcatccttccctgcatagaggcaatgatgaggacagcaattgttgccaaaatagctccaagaaaagctccaaggctaatcatcacttttaaaccaagaatgatgctcaaggttgcccctagagttgcacccgcagatattcctaagacataaggctctgcgataggattgttcactgtggactgcatcacgctaccacacatagaaaggcctgctcctactatcagacctaacaatactcgagggaatctcatgttccatacaatggcaagagtggacttggaaacctctcctacctcaagaggaaatcccaacctgctcaaaataatccgataggtatctcctagattaatcgcaacagatcccattgaaactgctagaaagagagaaatccctaaaatacctagcaaaataactaaaagtaacacaaattgctggtcttgtcggcttccagaaaattttggaaagcatgcaaacctcctttgatagaatcttaaaaatttagaaaattctcatgaaaagtataccatattttcaactgtgtaacaagctatggaaaaaatacaattaaaatcagaaaaattatggttggtttttccatacagttctaggaaccgtaaccaaagataatacttgagcataccaaggtaaggtgacaatgtaaaaagccctctgaaaatcagagagctgatttgagctcgggctaaaatcctagtgaaacaaaaaaatctacacgatcagaaaagtctctatcgtgccattttcatacatgatatatagtccaagtagaatgaatactaagggcacaatgattcgctcgtatttttcaattgtctcgaatattaacggaatagaggataacacccgactaagctcgcataagataattatgccgattacaaacacaagcaacgccacgagggtctgtgaccaatctaacgaagcaaaataaggtatatagatacctaaattatctccgccagacgcaattgtcagcaatgtaactgtccaaaacagttgatttgccttgctttgttctaatctttcaataatttcttcctcttcttcctcttcttcctcaccttctccaacaattgcaaagcgaatccctaaatagataggaattaaaccaagcaatccaaccatccattcttcaggcacgaaattaacaacataagcagcaactaaactcgcccctacaagtaagcctgtgcctagatattgccccgcataaatatgccatttttgtttattctgtgatagctgtgcaaataaaataattaaaataattaaataatcgatactggtggaaatataaacaccaatagcagatatgattgtctgtcccataaaaaacctcctgtattggtcagtaataaatcagcagattttaggagagcacagacacattaatttagctatcgctagtgggtaatgtcgaacataggaaagcattttactcctcctcaaaacgtagttacaaagtaatttctaactggaattcagtaactacttccatgtagagtataacatactatactttacttcgtaaagtgtgggctctccgaaggggcttgcagacagctactcggcttttcaagccgagtagctacgcacctttatggtgtaattagctgataccatttgaggtttttgtagtctccaaaattgtgaccgataaaacctcaataaaaaagccctctgaagtccgagagctgatttgagcccgggctaaaatcctagtgaaaaagatgaaactccttgtgttcatcgaacacggtgtcgtttccctattttcatacggatttcttacgcccttagcatcatgattcttgctggataaaacgtttatagattaggcggtaagccgaagattgtacaaaatttttagtaaaagataaattgtaagaataagtgcaacatttacttgaactcatcctctagggcttcacaagcatttctgtaagctaaacactttcgtggtcggtgattgatgtcatataaggcctttttcaaagcctcatcagaaatagcggctaaatctgttttctttgggaaatattctcttagtaagccatttgagttttcattgcttcctctctgccaggaataataggcatactcaaagaaaaagggaattcctaagttctctaccagaggatagcaggcaaactctaaaattggaatttcatgtttgtgtatcatctgttgcctcctaagttttaagaattattatatcaaaaaataaccactgtaatatgatttcataggaactacttcccaagaatcacaaagaaaaaccaattaaacaatgtacataactgaaaagaaaggacataaatctgctttagtcagaaacatgtcctttttgtgttttattttaagaaatatcatttcagtcggcgtttatttccacaaaccacctaaaatctgtttttccaacaaattcaagtcttcttctcttatgtcactattgtcgctaacgatatagagttgggcaaagtaggccaataagggacctataaaaatacgaaccatttgaggaaccgtgatttcaggattcactcgtgaatctgctatcaattccttatggagtactaataatttatcctgaagagtattccaaatataaagttgttcttttctcagtttcttatttgaaaaaatttcctgaagaataattttcatcaaagcgcgattcgttttgagataggccatacgattttggaccagataatgcaccttttcttcagtcgtttctaaggctaaaagttcttcaaaaaaacgaccgaaaagtcctggaacaacagggtgcaaaatagccgttaataaatcttctttggtcttgaaatacttgaagagcgttgcttggctaagtcccgcatgtttggcaatttgtaaggtggaggtcccattgtaactcttagtagaaatcaaatcgaccgccgcctgcatgatttttttctttcccttgggatagtctgccccctttagataagcttcaaacgactcaaaaacactctcactcattttcatcctcgtacatttacattttatactttacggtaacgacgcaagccgacaatattgagaactgtcaaagcgacaaggaagactagtagaacaccaatatttggtaaaatatctccaagtccacgtccgtaaagaataatctgactcatcgcatcacctgagtaggtcaaaggcaagaatttccctagcgtttttacccagtctcccattgaatcaagtggaatgattcctgaaaaaaagagttgcggcataatcacaagaggaataaattgcatcatctggaattctgattttgccaaggtagacaagagaattccgaaggctagtgccaccagagccagtaccacattaactattataacatttaacagacttccgacaacttcaattttcaacaaccagatggctgctagaacgactactcctgtctgcagtatggcaataaagccgtaagacaacatatagccgtaaacaatttccgaacgtttaactggggttgccaacaaacgatctagggttccgctagtacgttctttcaagagtgccatccctgaaatcaaaaagacaaagaagaaaacgacgaacccaagcaaaacaggaatcattttagcaaagaagccggtgtcctcgttaccatattcataagattccttaatttcaggagattttacctttagttctaattgcggaagggattgcttcacacgggctaataattgattagtgtcttcactggcaatactggtgcgtaatacttgtcggatcaccgaagttttagaggcatctgtattagcataggctacattatattccccatccttataagagataactgcatctactttttcatcgtttaaagcctctttagcttgatccaagtctttgtatgttttgacactgacatgctctaagtcatccatcctacttaccaaactacttggcacatcttgtatcgctagcttaacagtcaccgttgtactagccgaaaacatgaggttcatcagccacataataaagactggtgccacaaacattagggccagtgtccgtttgtcacgtagcaattctttgatgactttttttgcaatggcaattgttctcatttcattctccttctgctttcaaaaagacttcttcaatacttgaaacaccataagattcttttagcttggatggtgtatcaaaggctatgatttttccacctaatagtagaccgaccttatctgtcagctctgcctcatccatgacgtgagttgtgaccaaaatccctacacccttgtctctatgcgccatcaactctcgccagattttctttcgaagagaagggtcgattccaaccgtcggttcgtccaaaatcaagagttgagggtttcctaaaagcgcaatagccagcgacaagcgtcgtttcatccctccggaataaccagacacggccttatttaaatgatctgtcaagtctaccacttgagccacatgggtaatttcagctgtcaaatcttttttaggaatcccttttagctggccgaaaaattccaagttttcttgtcctgacaaagcctcataaagagcatctgactgggccatatagccaatatctcccagaatatgacgattgggcatggtctggtctaagactaaagcgataccgctatctgccttttccatccctaacatggttttaatcatggttgatttaccagcaccagaaggaccgattagaccaatgatttccccagactgtaattcaaaaccaacgtggtttaacacaagttgttgaccaaaagatttttgtaaatcttgtaaatgtagcaatgttttcatttacttcctcctaggtgagcgagcacttacttttttaaagataaatctattatagtgagtgaatactcacttgtcaagtgatgatttgaatttttttaaaacaaaaaatctccccgtagggagaatatctggtttattttaccttacagtgctaggaaccgtaacctaagattatacttgagcataccaaggtaaggtgacaacgtaaaaagccctctgaaaatcagagagctccagtcttgctggataaaccgtttatagactaggcgacgaggcgaagattgtacaaaatttttagtgaaacaaaaaaatctccccgtagggagaatatctggtttattttaccttacagtgctaggaaccgtaaccaaagataatacttgagcatatcaaggtaaggtgacaacgtaaaaagccctctgaaaatcagagagctacagtcttgctggataaaccgtttatagactaggcgacgaggcgaagattgtacaaaatttttagtgaaacaaaaaaatctccccgaagggagatcattctggtttattttaccttacagtgctaggaaccgtaaccgaagataatacttgagtatatcgaggtaaggtgacaacgcaatgtaagtggaaaataaagcagattaacgacgaagtcctagagagttgatcaactcacggtaacggttaacgtcgtttttacgcaagtatgcaagcaagttacgacggcgaccgatttttttcatcaatccacggtaagtagcgtggtcttttttgtgttgtttgatgtgttcgttaaggtggttgatttcccaagtaaggacagcaacttgaacctctactgaacctgtatcaccttcgtgacgtgcatattgtgcgatgatttcattttttttctcttttgagattgccatgatgtttctcctttttatttggcttcatccgagtgacaggttggcatgcctgtaaccaagaagaagttatttgtctttacgacaatccctattctaccaataactaacttctttgtcaacagatttactttcttgttttaaagatgctataataatcatagcaagaaatctaagttatctgttttttaaaacgaggtgattatcatgcgtagattctatttccatctcccctactatctggtcatatttttcttttattggccactttatgagttgttcttgctagttgtttctgaccccctcacactcaagggactctatataaacaatcttctcttctttacacctctggtaatcttgattatatcgctactctatagctaccgtttccgtttctcactttggtggttaattggtaacggactgctcttttgctttactatcataacttttggtgagtttatactaatttacttgctaatctatgaaaccttggctctggtgggcatggcttccggtattggcatcaagcatattctacaaaaatgaaaaacaaaaaactttcacaaaatccttgaaaaatctcacaatcatgctataataatccatagagacaagtcacttagtccctttctactagagagtgcgtggttgctggaaacgcataggaagtctaaactgatactactcttgagtttttatgaaaacataaaacggtggccacgttagagccaatcagaggtgtccctcttttttgaggaacataaatgaaggtggaaccacgttacgacgtcctttttaggatgtcgctttttgtttttctagctttcacaatcctctgtccctgttttcagaatagggttaacacattcgtcaataatataagtaaggagaacatcatgattaacattactttcccagacggcgctgttcgtgaattcgaatctggcgttacaacttttgaaattgcccaatctatcagcaattccctagctaaaaaggccttggctggtaaattcaacggcaaactcatcgacactactcgcgctatcactgaagatggaagcatcgaaattgtgacacctgaccacgaagatgcccttccaatcttgcgtcactcagctgctcacttgttcgcccaagcagctcgtcgtcttttcccagacattcacttgggagttggtccagccatcgaagatggtttctactatgatactgacaacactgctggtcaaatctctaacgaagaccttcctcgtatcgaagaagaaatgcaaaaaatcgtcaaagaaaacttcccatcaattcgtgaagaagtgactaaagacgaggcacgtgaaatcttcaagaacgacccttacaaattagaattgattgaagaacactcagaagacgaaggtggtttgaccatctaccgtcagggtgaatacgtggacctttgccgtggtcctcacgtcccatcaacaggccgtatccaaatcttccaccttcttaacgtagctggtgcttactggcgtggaaatagcgacaacgctatgatgcaacgtatctatggtacagcttggtttgacaagaaagacttgaaaagctaccttcaaatgcgtgaagaagccaaagaacgtgaccaccgtaaacttggtaaagagcttgatttattcatgatttctcaagaggttggtcaagggcttccattctggttgccaaatggtgcgactattcgtcgtgagttggaacgctacatcgtagacaaagagctagcttctggctaccaacacgtctacactccaccacttgcttctgttgagctttacaagacttctggtcactgggatcattatcaagaagacatgttcccaactatggacatgggtgacggggaagaatttgtccttcgtccaatgaactgcccgcaccacatccaagttttcaaacaccatgttcactcttaccgtgagttgccaatccgtatcgctgaaatcggtatgatgcaccgttatgaaaaatctggtgccctcactggtcttcaacgtgtacgtgaaatgtcactcaacgacggtcacctcttcgttactccagaacaaatccaagaagaattccaacgtgcccttcagttgattatcgatgtttatgaagatttcaacttgactgaataccgcttccgcctctctcttcgtgaccctcaagatactcataagtactttgataacgatgagatgtgggaaaatgcccaaactatgcttcgtgcagctcttgatgaaatgggtgtggattactttgaagccgaaggtgaagcagccttctacggaccaaaattggatattcaagttaaaaccgctcttggaaaagaagaaactctttctactatccagcttgacttcttgcttccagaacgcttcgaccttaaatacatcggagctgatggcgaagagcaccgtccagttatgattcaccgtggtgttatttcaactatggaacgcttcactgctatcttgattgagaactacaagggtgccttcccaacatggcttgcaccacaccaagtaaccctcatcccagtatctaacgaaaaacacgtagactacgcatgggaagtagctaagaaactccgtgaccgtggtgtccgtgcagacgtagatgagcgcaatgaaaaaatgcagttcaagatccgtgcttcacaaacaagcaagattccttaccaattgattgttggggacaaggaaatggaagacggaactgttaacgttcgtcgctatggccaaaaagaaacacaaactgtctcagttgatgactttgttcaagctatccttgctgatatcgccaacaaatcacgcgttgagaaataagagataaaacctgggataaaatcctagctacctaaaaagcaacaactatttcagctgttgctttttatattttatttaacctgagctagtagtgattgatcaaaccaccacacaagatttgctttcatgagttagatatggtcaatatcctcaatccttgtctgcttcattttcttttacgagatctttttgtgaatccttttcagagagtttttgatcgatatacttgttaatggtttcataaaattccttggtcgaatcactgtctaattttgtcgaattatgaacttgattgactttcaattgaacagattgaataccgtaagaggcttgtttttggtggagcgtttctaattcttcttctgaaagcggatctccaacaaccgtcaagaccaactcattgtttcttgatttgtagacttgattaatgaccgtgtgattggcgaactcttttcctacaaactgtttgattccttcttttcgcgcttgatctatcgttagagtgactgctgaatagctggccggaagaatcaataatacaatcaaggatatcaacccaattctcattttaatgtttagctctttaaatgaacttaagggagattttctcatcataattcttgttccaacaatgttgattagcatgataaagacacagttgatcaagaaaagatagagagccccaaataaaaatcgtacatttccattagctaaaccgtaacctgcagtgcagataggtggcatcagagctgttgcgatggctactcctggtacgatattgtttgcttcttttttccttgaaccaatgaaacctgctatcccaccagcaatagcaatgagcacatcccaaattgttggagaggttcgtgcaatcaattcgctactttcataagataagggagaaatccagaaatacagagccgagacaagcaagctaaccaatacttgggtaaataaaacctctagagattgcttgattaaacgcgtatcaaaaatagctaaaccaaatccgagtccaacaatcggtgtcataagaggggaaatcagcatggctccaataatgacagctgttgaattcatatttaggccaatagaggcaataaaaatcgcacacatcaaaatcactgtatctcttaatcgaacatgaagatcatcatataatttctcacggtattcacgtgttgaatagtttccggtcattggttactccttttatttcatataatcttgtttctgcatagatgatggtagagagacttctgtccaatcttacatatttttcttctcacctattattcttttgaaaataatcctctaagtatccgtcagtccatccttaacattatatcaaaaattttacagtctttctctgaggaaatctctcaatttaacagatagatgaagcaagaaatttttgtttccttatccgaagaaggaaaaacgatatctcctgaaccttgatactatgcgttttattctttataatttagctatttcaaaattacaagttctccattcttaatttcccaaacttggtcaaacttacttaataattcgttttggcgatgtaaagtaacaatgacggcacttggtagttccagaactctttccaattccattttaaactgattagtatccaaggcagagaaaggttcgtctaggataagcaatggatttttacgatttttctcacgatttaaatacattcgttgttgctgaccacctgacagggattgtggtggaattttttcaaaatcttcttctctgaatttttcattgaaactattgaatagcgttacattattttcataacttgaaataaatgtatgttcttgttgcagaatcataccgaatcttccccaaagatggtccaaaacaagcccatctagcacaatttgtccttcaaaatcttcatctgttccatttaaaatgttgagaagactactttttccagacccattcttaccaataagcgcaattttatcccctttttgaatcgtagcggaagtaattatcaattttgattctcccatttgtttggaaatgtttttcaaagtaatcgtatcaaaagaatgttgaggtgcttgaactgaaacgggtctcccaacaatgttttgaaaactcttgattacaggctttacggactctaacatttgtaaatcataaaggatttcctgtattggttcagaaaaagcattaatatatccgaaactcgccaccacctcaggaataccgagttgctggtgagatagagagtaggctaaataaataaacagaacaagactaatgaattcaaaagaaacacctgtcaataagatgccagtaatttttgtcaaaccatacttaaaatacttatcctgcaaattctttagagaactcttttgttgattcaaaaaatgcgacatagttagtttatttaccaaatgatgtcccatgagcaaatcctccaaagttcgatagtaatctccttgttttttcaagtaaacctgtctgcgattagcggtcaacttcccaacgattttaggaatttgaatactaattccagtggaaaagattaaaatcaatgatacaataggattaattgttctgctaataatgaaagcgtaaatgatgatacgtaaaatttgtttgataaaactcatcaatggaggaaggtaatccttttccaacgaatctaggtcattagattgataggaaatatactctgctactgttttctgcttgaaatcgtggtgactgagtcccagaagtgaacgaaaccactcatttttcaaagtagtcgaaaagataatcccctgcttccaatcaagtatcatttggatatagttacaactcaaatagccagccactgacatagagtaaccatatagagctacttgataatcccctttgattaatgcctgcgtgaaatacggtaacaaagctgtgcagatattcgatactacaccaaaaagaaaattaaagaagagataccatctaatagttttaagatatggtagcatatacgatactccttactaatgcgtttttttacatatcgcagaacaatctctactattccctatttcagatagtgcgatactcggacattgagtgcaataattgtaaatcacacaagtactgcagtttttactatcattcaaaataaaaagaaagctgcagttcttttaatcctgtatcaacgattcattctgaaatcgaataggagacatttcccaagtctacaattcacttcatctcaaattaatttctgtaattcacccttagtttatagattttatactcaacaaaagtataaagcatacaaaacttcactttgaaccagtatttatactatattccgtattaaaaattctattattggttttgaaaaaaacagtcttcaaatatcctgaaatatagcaaaaagagattgggtaaaaactcattgtctcttctcactcaaggactaagttcacttgagcaaactgaatccgcactgtcgttccttttccgacctcagactcgatgcgaatctggtgccccagttcttcagaaattttcttagataggtagaggccaagtccagatgactgctgggttaggcgtccattatatcctgaaaagccacgttcaaagactcggaggacatcactgttttttatcccgattcccgtatccttgatacaaagctcttgcccctccatataaatctccagaccaccttccttggtgtacttgagacagtttgagatgatttgctcaataaccactagcagccactttttatccgtcacgatttctttatcaaggtcatgtagattgacatttaagcctttttgaataaagaaaagagcatatttacgaattatttccttgaccaaatcctcaatttgcacctgctttaagaccaaatcatcatgaaaactttctaaacgcaggtactgtaagactagattagtataggagtcgattttgaaaatttcctgttctaattgctgcttcagttggcggtcggctacttctgcaactaagagttgactagctgcaatgggggtcttaatctgatgaacccacaaggtatagtaatccagcaaatccgtcaattttctttctgaatctgacctctgctgataaagttccatctcacgcgcttctaatttttctgctaaaactatttccaaaggagatttggcttccctctccccatagagaatttcctgacgatagacctgcatttccaccaatatgtcccaagtgaaaaataagatggttacaaagcaacacaagaggaaaaagtagagaaagtaaattcccaaactggcaaataaaaactgaaagagtaagagcagaaacgtcaaagaaatcagatagacaaacagacgactacgggaacgcagataggctagaaaaaattgtttccaatcaagcatgctttaatccgtaccctatccctttcttggtttcgataaatcctaccaagccctgctcttccaactttttacgcaatcgagccacattaacagatagggtattgtcatcaatgaaaaagtcactgttccaaagttcccgcatgagatcgtcacgcgctacaatattgcccgcatgctcaaacaaaactcgtaaaatctggaattcgttcttggtcaaattcaagacttgcccttgataatgtaaatccattgatttggtattgaggataacaccagcatattccagtaaactctcgtcacgcccaaactcatatgaacgtcgcaacaagccctgaactttggctaaaagaacctgctggtcaaaaggcttggtcacaaagtcatccgcccccatattgattgccatgacaatatccatagcctggtctctcgaagacagaaacatgatggggaccttggaaatcttgcgaatttcctgacaccagtgatagccattaaacaagggcagtccaatatccatgaggaccagatgaggctccgactggacaaaaagactcaaaacttccataaagtcttctaccagcaccacttcaaatccccattcagagagcattttcccgacctgttgacgaataacctgatcatcttctactaataaaatcttgtgcatgcgctcctccttttctattattataacagatttttcaatgctagaagatctgaaactgaatttgaagcagcttgtttttaggcaacaaaatgaggcaatcctactagctaatttaagggaaatttgataagataaataaaaagaaaggagctcttatggccaatatttttgactatctgaaagatgtcgcacacgattccttttacgacctacctttgaatgaattagatgttttagccttaacagaaaccacctacctctcctttgataatctggtctccacaactcctcagcgacttttagacctggcacctcaggttccaagagagcctaacatgttgaccagcaaaaatcgcctccagctattggatgaattagctcgacacaaacgcttcaaaaattgcaaactctcccattttatcaatgacatcaatcctgaattgcaaaaacaatttgcagctatgacctaccacctcaatctcgatacctatctgattgtctttcgtgggactgatgacagtatcattggctggaaggaagatttccacctgacttatatgaaggaaattcctgctcaaaagcatgccctccgctatttaaagaacttttttgcccaccatcctaagcaaaaggtcattctggctggacattccaagggaggaaatttagccatctatgctgctagtcaaattgagaaaaacttgcaaaatcaaatcacagcagtttatacctttgatgcgcctggtctccacacagaattgacacaaaccgagggctatcaaaggataatggataaaaccaaggtcttcattccacaaggttccatcatcggtatgatgctagaaatccctaaccagcaaatcatcgtgcacagtactgctttgggtggtatcgcccagcacgatacctttagttggcagattgaggacaagcacttcgtccaactggataaaaccaacagtgatagccaacaagttgacataaccttcaaagaatgggtggccacagtccctgacgaggaactccagctctacttcgatctcttctttggcaccattcttgattctggtattacttctatcaatgacttgtcttccttaaaggctatcgaacacattcatcatctcttcgtccaagctcaatccctaactccagaagaaagggaaactatgggacgtctcactcaattattgattgatacccgttaccaagcatggaaaaatagatagtactcttgaaaatcaaatgtatacaaaacaaaagacctagaatacatactttcatgtgcattctaagtctttttaaatagaatctgactaccaaataattcctttgtaggctatcaaaatgagtgctaatagcaggacataaaaggcaaggaaaagccatttcattttgacacagagagctacgtactcccgaataaaagcagatggtatgtagtagcctgccgtcctacatccgaggccatctcccttcatttttaacttacgagcataggtacttgttctaaagacatgataatcatttgttacaaagaggaattgaggtttggctaccagcttctcaccaagttccttagaaaagagaaggttctcgtaggtagtccttgattggtcctccaggataatcccatcttggggaacatcggtctcttcaagcagatagtttgtaatagcctgcgcttcagaaatcttctcatctcctccttgaccaccactagcaatgattttgatatgaggattcttagaattgtggtaagcttctactgccttatcaattctcctctttagcaaaggtgttaccttttctccgtctaacaaacctgcaccatgaatgatgataaaatcataatgcttcttcttaggaataaagagatacaagatagagtacaacataaaacccacaaaagcaaaaccaaaaataaagtaagaataagcaataaatgcaaataaaatgtttagaaagtgattggtgtaaaataattcatttctatcacccaatcgaaatgacatcaaggcaaaaaataacaaaatgactattccaaggagcattgagagataattagcctttgaacgtccctctcgcttcagcaagataaggccattatagattaaaaagatgccacttagaaaaagcagtatcggaagtaaaataaagggaaatataaaaaaagcgaaatgaatcttctcatacccattttgataaaaaaggtagcctagataaaaataactggaaatgagggataataagaataatactggattccacaaacttctattatctttccaaaatgacactataaaggctaatacaattcctataacaagatacatttcttcctcctttaatgattctattttatcacaattttacatagagaaaaagagggcatctacccctctcactccttcatttgactctctgcatcggctacgacctgttctagactggtctgaccaagctcagcctccatagccagctggattctctccaatttttgatccaaaacatcatgaatatgagctccaactgggcaatttggatttggattgtcatgaaaactgaagagttggcctgtcttaccaagacattcgaccgcttgataaacatctaaaagactaatgtctttgagatccttaacaatctctgttccgcccgttccgcgcgcgactgaaatcagctctgccttcttcaactgggacaaggtctttctgataatgactggattgaccccgacactagcagccagaaaatcactggtcaccttgctttccttcccctcgagggcaataattatcagcatatgagtcgcaatggtaaatctacttggaatttgcatcctcttctcctttttacgaggctaccctgcctctactcttctttttctattattataccctttttagttgtaatgtcaatcgttaccacttttcaaccaagcatctaattccctatcatagccctctttctgggctaattctctcagaaattcctgatgatgagtatggtggataccattgaccagactttcatagtaaacctcaaaatagggaagtttgaggtctttagctagctgcaattcagctgccacatcgtagtccacccgtcggaagtccatatctaccaagcccttgtcatcaaactccaaaatcatatactgggcccgtaagtccttccgcaactgggcatctagaaagaaaggttgcccaatcgaacctggattgacaatcaattgcccaccagtcccgtaacgaagcaactgctggtggatatgaccatagacagcaatatcacaaggcggattggtcaccaagcggtcaaaatcctcttgttctccagtgtgaatcaactctctcccccagttcttatcaggaagatgatggctaattcccaccgtcaaatccccaaactgacgatgaatctggagaggttgattgtggagcagttcaatttcttctagggaaatttcctctaaaacatactgacactggcgcaagagatagcgttgactgggacgagtactatccaattccttgcggacaccatgccacaaactgtcttcccagtttcccaaaactctagccgtaatcggtagttgagccaacaagtccaaaatccttctacgccctgtccctggcatgagaatgtctcccaaaagccagtattcatccactcctagctgccgcgcatctgctaaaactgcctctaaagcagtggtattaccatgaatatctgaaagaagagctattttcgtcatatccatctcctcgttttttctcttgcaataagtataacataaaaagtcacagctagagaaatctagctttttttgatatactagatatagatattagacaagaggaagcgaatgaccccgaataaagaagactatctaaaatgtatttatgaaattggcatagatttgcataaaatcaccaacaaggaaattgcggctcgcatgcaagtctctccccctgccgtaactgaaatgattaaacggatgaagagcgaaaacctcatccttaaggacaaggaatgtggctatctactgactgacctcggcctcaaattggtctctgagctctatcgtaagcatcgcttgattgaagtttttctagtccatcatttagactatacaagtgaccagattcacgaggaagctgaggtcttggaacatactgtctctgacctgttcgtggaaagactggataaattgctaggatttcccaagacctgtcctcatggaggaactattcctgtcaagggagaactcttagttgaaatcaataacctgccactagctgatatcaaggaagctggcgcctaccgcctgactcgggtgcacgatagttttgacattctccattatctggataagcactcacttcgcatcggtgatccgctccaagtcaagcagtttgatggcttcagtaacacctttactatccttagtaaagacgaggatttacaagtgaatatggacattgcaaaacaactctatgtcgagaaaatcaactaatttctcaagtcccccaaccaaccctgaaagttttattttcagggttttatttctatcatttgattttgctttcatttaattgtagaatatttgtaaaaaaaaagaaagatagtttaaactatgaaaaaatcactaaaaatttttgctacatctaaatggtttgacctcttcggggttgctttagtcgttgggattgcgattgcatctggttacctcaactcccgcctcgataaattcgtagactggggaccatggacagctcttgtaccctttggattgatttccgtaaccaacgttgggatttccatgttgtccactcgtttcacggggaaattaagcaaatggggaaattactttggtattgttaataccattttgtccggtgctattgattatatccttggaaataaggcggccatcatcacctatcccgtcaccttcctcatttatacctttgctattaagaaatgggaagcttcgcaagaaggcagacccaaccaaatgagccaaaaacagctaaaattggcggccatcatcatttccatcatcgccttcctctttgcctttgtgaccaactatatcggctatggaggaaagatgaatctccttgcctacgtaacaactattgcctttgcactgtccctcattgccaatgcttttaacgcattgaaactaacaactcagtggggcttttggttgatttacaatttcgttcagctgacaaaagctggtattcaaggaaattttgccaatatcggaaaatacatcttttatatcctcaatgcaatcggagctttatttgtctggaatgatgaagaagtaagataatagaagaaaacttaaataaaaaaacaagtcgacttaagagaatctcccttctgctatttttatcattttacttgtaactcccattcttttggagtagaatgaagttagataaaagagggaggtcatcttatgaaaaatctctttagaatccattttacagcaattgcagttatcgatttgctactattcgcattttttaacaaaagacccgagacatctttggagtggctcttgctatctggttttattttcctccttactcaaggactcctgttatttcgcttggttgtccgactcaaacatcaattcgctgagatttatcctcaaatcaataaaaagattcgcttctactatttaggggtgctcatcagcgactttctattttttgtccttttagccttcgttagttctcatcgtttttcatctcttatgccaatcatcactgcttgccattctactttttattatatgacagctgaccacctaagagaaaactatccagatttttacgacaaacacatctctttatgggagtgtctataaggaaaaggaggttttagcatgaaaaaaatcatcttcatcaaaaccattcaactccttgtcattgatggaatcatgctggcattcttgacatttaaagagggacttacttgggattggattttgatttatagcggttggctcattttctttcatcctgtgctattgacctatctttccaaccaactttgtgaccactttagtcacctttattcccagattagaccgagattctggcgttttgccttacaaatcctcctatgggatagcctgatcattctctccttgctgattgtaaggggtatcccacttttccttcagggaactctcctcatcctaggacatctcgtcccttcctatcgcatctgccaaagcctgaaacaagatttccccaaggcctatcaagaaccgatttcattttggaatattttatgatagataagaaaaaccaagccagctgggcttggtctttcttatctatttttagtatcaaggataatggtgactggtccgtcattgaccagctcaacctgcatatccgctccaaagatccctgtctgaacgggtacttcttgcgctaatttttgattgaaagcatcatagaagtctgatgccatatcaggcttggctgcgcctgtaaaggctggacgatttcctttcttagtatccgcaaagagggtaaactgagaaatagagaggatttctccttcaatatctttgacagacaggttcatcttgccttctgcgtctgaaaaaatccgcatattgaccagttttctcacagcatagtccaaatcttcctcttggtcctctggtccaacaccaaccagcaataagagtccctgattgattttcccctgaacctgaccttcgatactcacttgggcttttttaacccgttggataatgattttcataatagcctttctagtaagagctagggcaattaaccgttagtccgtttgacagagtaaacttctggcacactcttaatcttatccacgaccgaagtcagcgtcgagaggttggcaatgccaaaggatacatggatattagcaaacttcatatccttggttggttgagcgttaacagttgagatattcttggttgtgtttgaaagaacttgcagtacatcgttcaacagtcctgtacggttgagaccatagatatcgatatgagccatatactccttatttgagtttgaatactggtcttcccactccacatcaaggagacgttgctcgtagttttcttgggcacgcaggttcatacagtccacacggtgaatagccacaccacgacccttggtaatgtagccgacaatatcatcgccaggaacaggattacaacacttggcaatccgcactaggagacctgaggcaccttcaatgaccactccaccctcatgcttaaccttgagggtttctttgttctcaaccttgatctcgccacctttgacaagctctttagcaaattcaaatttactttccaagagaaatcttcccttcccctttttccttggcagtctgaactgctcgataaagcgaatagccactaactgtttcaaattctcgtcccaaacgtttttcttcgctcttgcttggcacgaccgctttgaatcccttataggagtccagtaactttttagcctctaccttgccttcataggcagcttcaacatcattaaaaaaagaaagcactgaagcaagttcttcagtgctccacgacaaatctagtgggtaactatactgtttgttcattaactaataccagctctcattcttgcttcttttagttcttgcttacggtaactacgagggagaaaagcacgaatctcatcttcattaaaaccgatctgcatacgtttggcatcgataataattggacgacgcaaaagacttggatactgctcaatcaaatgaagcaattctgataccgaaatactttctacatcaatatctaatttttgaaaaatttttgaacgagttgaaatgatgtcatcagtaccattttcggtcaaggaaaggatgtgttgcaattcttttcttgttaaaggactggtcataatattgtgttcctcaaagggaaccttatgtttttctaaccaggcctttgccttacgacatgaagtacagctcggtgatagaaatagtgtaatcatgcttttctcttcttatctatactttgctacttctattatacaaaaaaataaagcgcttgactagagatttt

SEQ ID NO: 67 - DNA, 164416 bp, Streptococcus mitis NCTC 12261 contig13
  misc_feature (162380)..(162380): n is a, c, g, or t
tactttttcatcgtttaaagcctctttagcttgatccaagtctttgtatgttttgacactgacatgctctaagtcatccatcctacttaccaaactacttggcacatcttgtatcgctagcttaacagtcaccgttgtactagccgaaaacatgaggttcatcagccacataataaagactggtgccacaaacattagggccagtgtccgtttgtcacgtagcaattctttgatgactttttttgcaatggcaattgttctcatttcattctccttctgctttcaaaaagacttcttcaatacttgaaacaccataagattcttttagcttggatggtgtatcaaaggctatgatttttccacctaatagtagaccgaccttatctgtcagctctgcctcatccatgacgtgagttgtgaccaaaatccctacacccttgtctctatgcgccatcaactctcgccagattttctttcgaagagaagggtcgattccaaccgtcggttcgtccaaaatcaagagttgagggtttcctaaaagcgcaatagccagcgacaagcgtcgtttcatccctccggaataaccagacacggccttatttaaatgatctgtcaagtctaccacttgagccacatgggtaatttcagctgtcaaatcttttttaggaatcccttttagctggccgaaaaattccaagttttcttgtcctgacaaagcctcataaagagcatctgactgggccatatagccaatatctcccagaatatgacgattgggcatggtctggtctaagactaaagcgataccgctatctgccttttccatccctaacatggttttaatcatggttgatttaccagcaccagaaggaccgattagaccaatgatttccccagactgtaattcaaaaccaacgtggtttaacacaagttgttgaccaaaagatttttgtaaatcttgtaaatgtagcaatgttttcatttacttcctcctaggtgagcgagcacttacttttttaaagataaatctattatagtgagtgaatactcacttgtcaagtgatgatttgaatttttttaaaacaaaaaatctccccgtagggagaatatctggtttattttaccttacagtgctaggaaccgtaacctaagattatacttgagcataccaaggtaaggtgacaacgtaaaaagccctctgaaaatcagagagctccagtcttgctggataaaccgtttatagactaggcgacgaggcgaagattgtacaaaatttttagtgaaacaaaaaaatctccccgtagggagaatatctggtttattttaccttacagtgctaggaaccgtaaccaaagataatacttgagcatatcaaggtaaggtgacaacgtaaaaagccctctgaaaatcagagagctacagtcttgctggataaaccgtttatagactaggcgacgaggcgaagattgtacaaaatttttagtgaaacaaaaaaatctccccgaagggagatcattctggtttattttaccttacagtgctaggaaccgtaaccgaagataatacttgagtatatcgaggtaaggtgacaacgcaatgtaagtggaaaataaagcagattaacgacgaagtcctagagagttgatcaactcacggtaacggttaacgtcgtttttacgcaagtatgcaagcaagttacgacggcgaccgatttttttcatcaatccacggtaagtagcgtggtcttttttgtgttgtttgatgtgttcgttaaggtggttgatttcccaagtaaggacagcaacttgaacctctactgaacctgtatcaccttcgtgacgtgcatattgtgcgatgatttcattttttttctcttttgagattgccatgatgtttctcctttttatttggcttcatccgagtgacaggttggcatgcctgtaaccaagaagaagttatttgtctttacgacaatccctattctaccaataactaacttctttgtcaacagatttactttcttgttttaaagatgctataataatcatagcaagaaatctaagttatctgttttttaaaacgaggtgattatcatgcgtagattctatttccatctcccctactatctggtcatatttttcttttattggccactttatgagttgttcttgctagttgtttctgaccccctcacactcaagggactctatataaacaatcttctcttctttacacctctggtaatcttgattatatcgctactctatagctaccgtttccgtttctcactttggtggttaattggtaacggactgctcttttgctttactatcataacttttggtgagtttatactaatttacttgctaatctatgaaaccttggctctggtgggcatggcttccggtattggcatcaagcatattctacaaaaatgaaaaacaaaaaactttcacaaaatccttgaaaaatctcacaatcatgctataataatccatagagacaagtcacttagtccctttctactagagagtgcgtggttgctggaaacgcataggaagtctaaactgatactactcttgagtttttatgaaaacataaaacggtggccacgttagagccaatcagaggtgtccctcttttttgaggaacataaatgaaggtggaaccacgttacgacgtcctttttaggatgtcgctttttgtttttctagctttcacaatcctctgtccctgttttcagaatagggttaacacattcgtcaataatataagtaaggagaacatcatgattaacattactttcccagacggcgctgttcgtgaattcgaatctggcgttacaacttttgaaattgcccaatctatcagcaattccctagctaaaaaggccttggctggtaaattcaacggcaaactcatcgacactactcgcgctatcactgaagatggaagcatcgaaattgtgacacctgaccacgaagatgcccttccaatcttgcgtcactcagctgctcacttgttcgcccaagcagctcgtcgtcttttcccagacattcacttgggagttggtccagccatcgaagatggtttctactatgatactgacaacactgctggtcaaatctctaacgaagaccttcctcgtatcgaagaagaaatgcaaaaaatcgtcaaagaaaacttcccatcaattcgtgaagaagtgactaaagacgaggcacgtgaaatcttcaagaacgacccttacaaattagaattgattgaagaacactcagaagacgaaggtggtttgaccatctaccgtcagggtgaatacgtggacctttgccgtggtcctcacgtcccatcaacaggccgtatccaaatcttccaccttcttaacgtagctggtgcttactggcgtggaaatagcgacaacgctatgatgcaacgtatctatggtacagcttggtttgacaagaaagacttgaaaagctaccttcaaatgcgtgaagaagccaaagaacgtgaccaccgtaaacttggtaaagagcttgatttattcatgatttctcaagaggttggtcaagggcttccattctggttgccaaatggtgcgactattcgtcgtgagttggaacgctacatcgtagacaaagagctagcttctggctaccaacacgtctacactccaccacttgcttctgttgagctttacaagacttctggtcactgggatcattatcaagaagacatgttcccaactatggacatgggtgacggggaagaatttgtccttcgtccaatgaactgcccgcaccacatccaagttttcaaacaccatgttcactcttaccgtgagttgccaatccgtatcgctgaaatcggtatgatgcaccgttatgaaaaatctggtgccctcactggtcttcaacgtgtacgtgaaatgtcactcaacgacggtcacctcttcgttactccagaacaaatccaagaagaattccaacgtgcccttcagttgattatcgatgtttatgaagatttcaacttgactgaataccgcttccgcctctctcttcgtgaccctcaagatactcataagtactttgataacgatgagatgtgggaaaatgcccaaactatgcttcgtgcagctcttgatgaaatgggtgtggattactttgaagccgaaggtgaagcagccttctacggaccaaaattggatattcaagttaaaaccgctcttggaaaagaagaaactctttctactatccagcttgacttcttgcttccagaacgcttcgaccttaaatacatcggagctgatggcgaagagcaccgtccagttatgattcaccgtggtgttatttcaactatggaacgcttcactgctatcttgattgagaactacaagggtgccttcccaacatggcttgcaccacaccaagtaaccctcatcccagtatctaacgaaaaacacgtagactacgcatgggaagtagctaagaaactccgtgaccgtggtgtccgtgcagacgtagatgagcgcaatgaaaaaatgcagttcaagatccgtgcttcacaaacaagcaagattccttaccaattgattgttggggacaaggaaatggaagacggaactgttaacgttcgtcgctatggccaaaaagaaacacaaactgtctcagttgatgactttgttcaagctatccttgctgatatcgccaacaaatcacgcgttgagaaataagagataaaacctgggataaaatcctagctacctaaaaagcaacaactatttcagctgttgctttttatattttatttaacctgagctagtagtgattgatcaaaccaccacacaagatttgctttcatgagttagatatggtcaatatcctcaatccttgtctgcttcattttcttttacgagatctttttgtgaatccttttcagagagtttttgatcgatatacttgttaatggtttcataaaattccttggtcgaatcactgtctaattttgtcgaattatgaacttgattgactttcaattgaacagattgaataccgtaagaggcttgtttttggtggagcgtttctaattcttcttctgaaagcggatctccaacaaccgtcaagaccaactcattgtttcttgatttgtagacttgattaatgaccgtgtgattggcgaactcttttcctacaaactgtttgattccttcttttcgcgcttgatctatcgttagagtgactgctgaatagctggccggaagaatcaataatacaatcaaggatatcaacccaattctcattttaatgtttagctctttaaatgaacttaagggagattttctcatcataattcttgttccaacaatgttgattagcatgataaagacacagttgatcaagaaaagatagagagccccaaataaaaatcgtacatttccattagctaaaccgtaacctgcagtgcagataggtggcatcagagctgttgcgatggctactcctggtacgatattgtttgcttcttttttccttgaaccaatgaaacctgctatcccaccagcaatagcaatgagcacatcccaaattgttggagaggttcgtgcaatcaattcgctactttcataagataagggagaaatccagaaatacagagccgagacaagcaagctaaccaatacttgggtaaataaaacctctagagattgcttgattaaacgcgtatcaaaaatagctaaaccaaatccgagtccaacaatcggtgtcataagaggggaaatcagcatggctccaataatgacagctgttgaattcatatttaggccaatagaggcaataaaaatcgcacacatcaaaatcactgtatctcttaatcgaacatgaagatcatcatataatttctcacggtattcacgtgttgaatagtttccggtcattggttactccttttatttcatataatcttgtttctgcatagatgatggtagagagacttctgtccaatcttacatatttttcttctcacctattattcttttgaaaataatcctctaagtatccgtcagtccatccttaacattatatcaaaaattttacagtctttctctgaggaaatctctcaatttaacagatagatgaagcaagaaatttttgtttccttatccgaagaaggaaaaacgatatctcctgaaccttgatactatgcgttttattctttataatttagctatttcaaaattacaagttctccattcttaatttcccaaacttggtcaaacttacttaataattcgttttggcgatgtaaagtaacaatgacggcacttggtagttccagaactctttccaattccattttaaactgattagtatccaaggcagagaaaggttcgtctaggataagcaatggatttttacgatttttctcacgatttaaatacattcgttgttgctgaccacctgacagggattgtggtggaattttttcaaaatcttcttctctgaatttttcattgaaactattgaatagcgttacattattttcataacttgaaataaatgtatgttcttgttgcagaatcataccgaatcttccccaaagatggtccaaaacaagcccatctagcacaatttgtccttcaaaatcttcatctgttccatttaaaatgttgagaagactactttttccagacccattcttaccaataagcgcaattttatcccctttttgaatcgtagcggaagtaattatcaattttgattctcccatttgtttggaaatgtttttcaaagtaatcgtatcaaaagaatgttgaggtgcttgaactgaaacgggtctcccaacaatgttttgaaaactcttgattacaggctttacggactctaacatttgtaaatcataaaggatttcctgtattggttcagaaaaagcattaatatatccgaaactcgccaccacctcaggaataccgagttgctggtgagatagagagtaggctaaataaataaacagaacaagactaatgaattcaaaagaaacacctgtcaataagatgccagtaatttttgtcaaaccatacttaaaatacttatcctgcaaattctttagagaactcttttgttgattcaaaaaatgcgacatagttagtttatttaccaaatgatgtcccatgagcaaatcctccaaagttcgatagtaatctccttgttttttcaagtaaacctgtctgcgattagcggtcaacttcccaacgattttaggaatttgaatactaattccagtggaaaagattaaaatcaatgatacaataggattaattgttctgctaataatgaaagcgtaaatgatgatacgtaaaatttgtttgataaaactcatcaatggaggaaggtaatccttttccaacgaatctaggtcattagattgataggaaatatactctgctactgttttctgcttgaaatcgtggtgactgagtcccagaagtgaacgaaaccactcatttttcaaagtagtcgaaaagataatcccctgcttccaatcaagtatcatttggatatagttacaactcaaatagccagccactgacatagagtaaccatatagagctacttgataatcccctttgattaatgcctgcgtgaaatacggtaacaaagctgtgcagatattcgatactacaccaaaaagaaaattaaagaagagataccatctaatagttttaagatatggtagcatatacgatactccttactaatgcgtttttttacatatcgcagaacaatctctactattccctatttcagatagtgcgatactcggacattgagtgcaataattgtaaatcacacaagtactgcagtttttactatcattcaaaataaaaagaaagctgcagttcttttaatcctgtatcaacgattcattctgaaatcgaataggagacatttcccaagtctacaattcacttcatctcaaattaatttctgtaattcacccttagtttatagattttatactcaacaaaagtataaagcatacaaaacttcactttgaaccagtatttatactatattccgtattaaaaattctattattggttttgaaaaaaacagtcttcaaatatcctgaaatatagcaaaaagagattgggtaaaaactcattgtctcttctcactcaaggactaagttcacttgagcaaactgaatccgcactgtcgttccttttccgacctcagactcgatgcgaatctggtgccccagttcttcagaaattttcttagataggtagaggccaagtccagatgactgctgggttaggcgtccattatatcctgaaaagccacgttcaaagactcggaggacatcactgttttttatcccgattcccgtatccttgatacaaagctcttgcccctccatataaatctccagaccaccttccttggtgtacttgagacagtttgagatgatttgctcaataaccactagcagccactttttatccgtcacgatttctttatcaaggtcatgtagattgacatttaagcctttttgaataaagaaaagagcatatttacgaattatttccttgaccaaatcctcaatttgcacctgctttaagaccaaatcatcatgaaaactttctaaacgcaggtactgtaagactagattagtataggagtcgattttgaaaatttcctgttctaattgctgcttcagttggcggtcggctacttctgcaactaagagttgactagctgcaatgggggtcttaatctgatgaacccacaaggtatagtaatccagcaaatccgtcaattttctttctgaatctgacctctgctgataaagttccatctcacgcgcttctaatttttctgctaaaactatttccaaaggagatttggcttccctctccccatagagaatttcctgacgatagacctgcatttccaccaatatgtcccaagtgaaaaataagatggttacaaagcaacacaagaggaaaaagtagagaaagtaaattcccaaactggcaaataaaaactgaaagagtaagagcagaaacgtcaaagaaatcagatagacaaacagacgactacgggaacgcagataggctagaaaaaattgtttccaatcaagcatgctttaatccgtaccctatccctttcttggtttcgataaatcctaccaagccctgctcttccaactttttacgcaatcgagccacattaacagatagggtattgtcatcaatgaaaaagtcactgttccaaagttcccgcatgagatcgtcacgcgctacaatattgcccgcatgctcaaacaaaactcgtaaaatctggaattcgttcttggtcaaattcaagacttgcccttgataatgtaaatccattgatttggtattgaggataacaccagcatattccagtaaactctcgtcacgcccaaactcatatgaacgtcgcaacaagccctgaactttggctaaaagaacctgctggtcaaaaggcttggtcacaaagtcatccgcccccatattgattgccatgacaatatccatagcctggtctctcgaagacagaaacatgatggggaccttggaaatcttgcgaatttcctgacaccagtgatagccattaaacaagggcagtccaatatccatgaggaccagatgaggctccgactggacaaaaagactcaaaacttccataaagtcttctaccagcaccacttcaaatccccattcagagagcattttcccgacctgttgacgaataacctgatcatcttctactaataaaatcttgtgcatgcgctcctccttttctattattataacagatttttcaatgctagaagatctgaaactgaatttgaagcagcttgtttttaggcaacaaaatgaggcaatcctactagctaatttaagggaaatttgataagataaataaaaagaaaggagctcttatggccaatatttttgactatctgaaagatgtcgcacacgattccttttacgacctacctttgaatgaattagatgttttagccttaacagaaaccacctacctctcctttgataatctggtctccacaactcctcagcgacttttagacctggcacctcaggttccaagagagcctaacatgttgaccagcaaaaatcgcctccagctattggatgaattagctcgacacaaacgcttcaaaaattgcaaactctcccattttatcaatgacatcaatcctgaattgcaaaaacaatttgcagctatgacctaccacctcaatctcgatacctatctgattgtctttcgtgggactgatgacagtatcattggctggaaggaagatttccacctgacttatatgaaggaaattcctgctcaaaagcatgccctccgctatttaaagaacttttttgcccaccatcctaagcaaaaggtcattctggctggacattccaagggaggaaatttagccatctatgctgctagtcaaattgagaaaaacttgcaaaatcaaatcacagcagtttatacctttgatgcgcctggtctccacacagaattgacacaaaccgagggctatcaaaggataatggataaaaccaaggtcttcattccacaaggttccatcatcggtatgatgctagaaatccctaaccagcaaatcatcgtgcacagtactgctttgggtggtatcgcccagcacgatacctttagttggcagattgaggacaagcacttcgtccaactggataaaaccaacagtgatagccaacaagttgacataaccttcaaagaatgggtggccacagtccctgacgaggaactccagctctacttcgatctcttctttggcaccattcttgattctggtattacttctatcaatgacttgtcttccttaaaggctatcgaacacattcatcatctcttcgtccaagctcaatccctaactccagaagaaagggaaactatgggacgtctcactcaattattgattgatacccgttaccaagcatggaaaaatagatagtactcttgaaaatcaaatgtatacaaaacaaaagacctagaatacatactttcatgtgcattctaagtctttttaaatagaatctgactaccaaataattcctttgtaggctatcaaaatgagtgctaatagcaggacataaaaggcaaggaaaagccatttcattttgacacagagagctacgtactcccgaataaaagcagatggtatgtagtagcctgccgtcctacatccgaggccatctcccttcatttttaacttacgagcataggtacttgttctaaagacatgataatcatttgttacaaagaggaattgaggtttggctaccagcttctcaccaagttccttagaaaagagaaggttctcgtaggtagtccttgattggtcctccaggataatcccatcttggggaacatcggtctcttcaagcagatagtttgtaatagcctgcgcttcagaaatcttctcatctcctccttgaccaccactagcaatgattttgatatgaggattcttagaattgtggtaagcttctactgccttatcaattctcctctttagcaaaggtgttaccttttctccgtctaacaaacctgcaccatgaatgatgataaaatcataatgcttcttcttaggaataaagagatacaagatagagtacaacataaaacccacaaaagcaaaaccaaaaataaagtaagaataagcaataaatgcaaataaaatgtttagaaagtgattggtgtaaaataattcatttctatcacccaatcgaaatgacatcaaggcaaaaaataacaaaatgactattccaaggagcattgagagataattagcctttgaacgtccctctcgcttcagcaagataaggccattatagattaaaaagatgccacttagaaaaagcagtatcggaagtaaaataaagggaaatataaaaaaagcgaaatgaatcttctcatacccattttgataaaaaaggtagcctagataaaaataactggaaatgagggataataagaataatactggattccacaaacttctattatctttccaaaatgacactataaaggctaatacaattcctataacaagatacatttcttcctcctttaatgattctattttatcacaattttacatagagaaaaagagggcatctacccctctcactccttcatttgactctctgcatcggctacgacctgttctagactggtctgaccaagctcagcctccatagccagctggattctctccaatttttgatccaaaacatcatgaatatgagctccaactgggcaatttggatttggattgtcatgaaaactgaagagttggcctgtcttaccaagacattcgaccgcttgataaacatctaaaagactaatgtctttgagatccttaacaatctctgttccgcccgttccgcgcgcgactgaaatcagctctgccttcttcaactgggacaaggtctttctgataatgactggattgaccccgacactagcagccagaaaatcactggtcaccttgctttccttcccctcgagggcaataattatcagcatatgagtcgcaatggtaaatctacttggaatttgcatcctcttctcctttttacgaggctaccctgcctctactcttctttttctattattataccctttttagttgtaatgtcaatcgttaccacttttcaaccaagcatctaattccctatcatagccctctttctgggctaattctctcagaaattcctgatgatgagtatggtggataccattgaccagactttcatagtaaacctcaaaatagggaagtttgaggtctttagctagctgcaattcagctgccacatcgtagtccacccgtcggaagtccatatctaccaagcccttgtcatcaaactccaaaatcatatactgggcccgtaagtccttccgcaactgggcatctagaaagaaaggttgcccaatcgaacctggattgacaatcaattgcccaccagtcccgtaacgaagcaactgctggtggatatgaccatagacagcaatatcacaaggcggattggtcaccaagcggtcaaaatcctcttgttctccagtgtgaatcaactctctcccccagttcttatcaggaagatgatggctaattcccaccgtcaaatccccaaactgacgatgaatctggagaggttgattgtggagcagttcaatttcttctagggaaatttcctctaaaacatactgacactggcgcaagagatagcgttgactgggacgagtactatccaattccttgcggacaccatgccacaaactgtcttcccagtttcccaaaactctagccgtaatcggtagttgagccaacaagtccaaaatccttctacgccctgtccctggcatgagaatgtctcccaaaagccagtattcatccactcctagctgccgcgcatctgctaaaactgcctctaaagcagtggtattaccatgaatatctgaaagaagagctattttcgtcatatccatctcctcgttttttctcttgcaataagtataacataaaaagtcacagctagagaaatctagctttttttgatatactagatatagatattagacaagaggaagcgaatgaccccgaataaagaagactatctaaaatgtatttatgaaattggcatagatttgcataaaatcaccaacaaggaaattgcggctcgcatgcaagtctctccccctgccgtaactgaaatgattaaacggatgaagagcgaaaacctcatccttaaggacaaggaatgtggctatctactgactgacctcggcctcaaattggtctctgagctctatcgtaagcatcgcttgattgaagtttttctagtccatcatttagactatacaagtgaccagattcacgaggaagctgaggtcttggaacatactgtctctgacctgttcgtggaaagactggataaattgctaggatttcccaagacctgtcctcatggaggaactattcctgtcaagggagaactcttagttgaaatcaataacctgccactagctgatatcaaggaagctggcgcctaccgcctgactcgggtgcacgatagttttgacattctccattatctggataagcactcacttcgcatcggtgatccgctccaagtcaagcagtttgatggcttcagtaacacctttactatccttagtaaagacgaggatttacaagtgaatatggacattgcaaaacaactctatgtcgagaaaatcaactaatttctcaagtcccccaaccaaccctgaaagttttattttcagggttttatttctatcatttgattttgctttcatttaattgtagaatatttgtaaaaaaaagaaagatagtttaaactatgaaaaaatcactaaaaatttttgctacatctaaatggtttgacctcttcggggttgctttagtcgttgggattgcgattgcatctggttacctcaactcccgcctcgataaattcgtagactggggaccatggacagctcttgtaccctttggattgatttccgtaaccaacgttgggatttccatgttgtccactcgtttcacggggaaattaagcaaatggggaaattactttggtattgttaataccattttgtccggtgctattgattatatccttggaaataaggcggccatcatcacctatcccgtcaccttcctcatttatacctttgctattaagaaatgggaagcttcgcaagaaggcagacccaaccaaatgagccaaaaacagctaaaattggcggccatcatcatttccatcatcgccttcctctttgcctttgtgaccaactatatcggctatggaggaaagatgaatctccttgcctacgtaacaactattgcctttgcactgtccctcattgccaatgcttttaacgcattgaaactaacaactcagtggggcttttggttgatttacaatttcgttcagctgacaaaagctggtattcaaggaaattttgccaatatcggaaaatacatcttttatatcctcaatgcaatcggagctttatttgtctggaatgatgaagaagtaagataatagaagaaaacttaaataaaaaaacaagtcgacttaagagaatctcccttctgctatttttatcattttacttgtaactcccattcttttggagtagaatgaagttagataaaagagggaggtcatcttatgaaaaatctctttagaatccattttacagcaattgcagttatcgatttgctactattcgcattttttaacaaaagacccgagacatctttggagtggctcttgctatctggttttattttcctccttactcaaggactcctgttatttcgcttggttgtccgactcaaacatcaattcgctgagatttatcctcaaatcaataaaaagattcgcttctactatttaggggtgctcatcagcgactttctattttttgtccttttagccttcgttagttctcatcgtttttcatctcttatgccaatcatcactgcttgccattctactttttattatatgacagctgaccacctaagagaaaactatccagatttttacgacaaacacatctctttatgggagtgtctataaggaaaaggaggttttagcatgaaaaaaatcatcttcatcaaaaccattcaactccttgtcattgatggaatcatgctggcattcttgacatttaaagagggacttacttgggattggattttgatttatagcggttggctcattttctttcatcctgtgctattgacctatctttccaaccaactttgtgaccactttagtcacctttattcccagattagaccgagattctggcgttttgccttacaaatcctcctatgggatagcctgatcattctctccttgctgattgtaaggggtatcccacttttccttcagggaactctcctcatcctaggacatctcgtcccttcctatcgcatctgccaaagcctgaaacaagatttccccaaggcctatcaagaaccgatttcattttggaatattttatgatagataagaaaaaccaagccagctgggcttggtctttcttatctatttttagtatcaaggataatggtgactggtccgtcattgaccagctcaacctgcatatccgctccaaagatccctgtctgaacgggtacttcttgcgctaatttttgattgaaagcatcatagaagtctgatgccatatcaggcttggctgcgcctgtaaaggctggacgatttcctttcttagtatccgcaaagagggtaaactgagaaatagagaggatttctccttcaatatctttgacagacaggttcatcttgccttctgcgtctgaaaaaatccgcatattgaccagttttctcacagcatagtccaaatcttcctcttggtcctctggtccaacaccaaccagcaataagagtccctgattgattttcccctgaacctgaccttcgatactcacttgggcttttttaacccgtttggataatgattttcataatagcctttctagtaagagctagggcaattaaccgttagtccgtttgacagagtaaacttctggcacactcttaatcttatccacgaccgaagtcagcgtcgagaggttggcaatgccaaaggatacatggatattagcaaacttcatatccttggttggttgagcgttaacagttgagatattcttggttgtgtttgaaagaacttgcagtacatcgttcaacagtcctgtacggttgagaccatagatatcgatatgagccatatactccttatttgagtttgaatactggtcttcccactccacatcaaggagacgttgctcgtagttttcttgggcacgcaggttcatacagtccacacggtgaatagccacaccacgacccttggtaatgtagccgacaatatcatcgccaggaacaggattacaacacttggcaatccgcactaggagacctgaggcaccttcaatgaccactccaccctcatgcttaaccttgagggtttctttgttctcaaccttgatctcgccacctttgacaagctcttctgcttccgccttggccttggcacgttcttcttcacggcgttccttttcagtcagacggttaaagacagtaatagcaccgatttctccaaaaccaatggctgcaaagagggattcttctgtcttgtagctggtcttttgcagaacttggtccatatgacgcttgtccatgaatttattggccatatagccattttcttggaactgagccatcagcatttcacgacccttgttgacagacaattccttatcttgatttttaaagaactgacggatcttgttgcgggccttgctggtcttgaccatattgagccagtcacggctaggtccaaaggagttcgggttggtgacaatttcaacctgatcccctgtcttgagcttagttgtcagaggaaccatacggccattgaccttggcacccgtcgctttttcaccgacttttgtatggatttcgtaggcaaagtcaatcggtcctgaatcttttggaagggaacggacagctccatctggggtaaagacataaatctcctcagccagatagttttccttaactgaatcgacaaattccttggcatcatcagcctggtcttggagctccatcatctccttgatccagttcatcccaatagctgattccttgctgttaacctgccccttgatgcccttcttataagcccagtgagccgcaaccccgtactcagccacctcgtgcatttccttggtccgaatctggaattcaatcggcccttttggcccatagacagtcgtatggatagactgataaccattggccttgcggttagcgatatagtctttgaaacgacctggcattggtttccaaagttcatgcacataaccaagcatggcataaacatcactttgggtatctaaaatacaacgaatagcaatcaggtcatagatttcctcaaaacgttttctcttatcctgcattttgcggaaaatcgagtaaatatgcttgggacgaccataaatcttcccttttaagtgacgatctgtcgtatattcctctaattttgtgactacctcatccaccaaggcttcacgctctctgcgcttttccttcatcatatgggtaatcttgtaaaactccgttgggttgagataacggaaagacaggtcttccaattcccatttaacgctagaaatccccaaacggtgagcaagtggtgcatagatttccatggtttctttggaaatgcgctcctgcttgtcttttcgaaggtgtttcagggtccgcatattgtgcaagcggtcagacagtttgaccaagataacacggatgtcctcagacatggccatgagcatcttgcgatgattttcagccaactgctcttcgtgagacttgtacttgaccttaccgagcttggtaactccatcgacaatcacgcgcacatcaggaccaaactctctttccaaatcgtccaaggtcgcatcagtatcttccaccacatcatgcaagaaaccacaagctactgttacagcatccaacttgagtttggctaaaatacctgccacttggatagggtgaatgatataaggctcgcctgatttgcgatactggccactgtggcattcaacggcgtaaaccaaggccttatggacaaaagccacatcttcttcccgataaatatttctgtgttaaagcgacaacttcatcgcctgttaaattcacttcttttggcatctctactctccaattcttcctaccattttatcacttttttaagaatatgaaaactagaaaaagaggattctgaagctattcaatttgttgggatggatgatagaataagattcaaacttaaaaaataaaattatctgattttcatctaacttttttgaaatatagtctacgctaaaagttagtgaaataaaaatcttttcttctgtttaaataagaaaaggtttgatattttggtaattttctaacatttttagtgtataatggtaatataaacagtttttttacgatgattactgaattttcatttttctagaaaggcaaacaacatgaaatcacacaaaagactgacacttttagccttggcttttcttggactaacaaaccaagtcgttttggctgatgatactagtcattccgctactaaccctatgactagttcaactagtagctcaacaaatacttccactagtcattctactaacagttctacaaatacttctgctagtagttctcaagctagtacagaaacttcgtcgagcacagctagttcaagtgagcaagaaagcaaaccttctctttccacagaaaccaaacccaatcaacctatacaaactggctgggtaaaagaggggaacaagtggactttttatagtcaaactggggtcaaatttacagataccctctatgaaggttatttctttgatagtcatggctacttgcttgaaaacagctggtaccaaatgggaaacaattggtactatatcaatggttcaggtaaatatttatccaaccaatggagccaaatcaatggcaagtggtatgcttttgatggctatggtagaatgttggccaatgtctggaaaggcgattactacctcaaatccagtggtgctatggcagatagggaatgggtctacgaccaaagctactctagttggttttacctaaaatctggcggacgctatgcccaaaaacaatggattggttcctactaccttaaatctggtggctacatggcccataaggaatggatctacgaccaagactatcaagcttggtactatcttaaggacgatggtgtgtatgtcacaggaacctatgcagttgatggtaaaaaccagctcttccaagggaatggaaaatgggttcgtgaattagcacaaggttttcaaaaaggacattactctaaaactatctttcttgatccaggtcacggtggtaaggatcgcggggcttattactatggcatagctgaaaaagaattgaacctacaagtttatcgtaagctacgtaaacgactagaaggactcggctataccgttctcacctctcgagatagtgatatagacgttaattttattaccgagcgttctcgtatggtcaacaagaccaatgctgactttttcatcagccttcatttcaatgcaaaagggaataatacaaccgttaatcttggcatccagacctattcttacaaggatgaacctggtttccctagcaagattaacaaggattggcacaacaatcctgaacggatgagtgaaagtaatcgtctcgcagctgatatccattcttcactgctagctgaaactggagctagggatgctgggctcttgcaagcaacctttgctgttctccgtgaaacagctaaaccagctgttttgctggagatgggatatatggataatccagaagaaaaccaaaaaatccgcagcagtgactaccaagataaactagttgaagggattatcaagggaatccaaaaatattatgctggtaattaaaacagtttaagcctcgaactaactcgaggcttattttttatccaaaccatcttcttctttctagaactatttcgcttttcagcttattcttcctaactgtgctatacttatcttagtacattctttgagattggagctaatatgaaaatccataaaaccgtgaatcctgttgcctatgaaaacacctattacctagaaggcgaaaagcacctcatcgttgtcgatcctggtagcgattgggacgctattcgtcagacaatagagaacatcaacaaaccgatctgcgctattctccttacccacgcccattatgaccatatcatgagtctggacttagttcgcgaaacttttggcaatcctcctgtctatatcgcagagagcgaagctagctggctctatactcctatcgataacctctctggtctccctcgtcatgatgatatgacagatgtgatcgcagaacctgctgaacacacctttgtctttcataaggaatatcaactggaggaatttcgtttcactgtcttgccaacaccagggcactctatcggcggtgtttctatcgtctttcctggtgctcacctagttttgacaggagatgccctattccgtgaaactattggacgaaccgaccttccaactggtagtacggagcaactcctccatagtatccagacccaactcttcaccctaccaaactatgatgtctatccagggcatggtccagctacgaccatcgcccatgaaaagacctttaatccttttttctagtaaaatgatgacaatgtctatcgcattttaagtacactatccagcaagtctttccactataaaaggcatccagtcaaggttttcacacctgattggatgccttttttctgatgactagattttttgcattaccaaataatcacacggtcttctggtgaacgccacattccgtccccttctttgacatcataggttgtaaagaagtcatcaaagtttggcacttggacattgacacgaagtttagctggcgcgtgtacgtcgacgctagccatgagtttcatcaactctggacgccctttcatacgccagatacgagcaaagttatggaagaactcttcagctgagaagtctggctctctcttagcagcttctagcgctgcagcaattcctccaaggtccgcaacgttttcggatacagttaatttcccattgatttttgcaccgtaagattcttgaccatcaaactggtcgataaccttctgtgttttttctttaaaggctgcatagtcgctttctgtccaccagtccttgaggctaccattttcatcaaaggaagcaccattagtatcaaaggcgtgagaaatttcatgggcaataaccgcaccaataccaccatagttggcagaagatgactgatgcaagtcatagaatggtgcctgtaagatagcagctgggaagacaatcaagttcttttgtggattgtagtaggcattgaccatatgagcaggcattccccactccttgtagtcaaccggctgattccacttgctccagctgtgcttaatttctacacgcgcaaatgctagagcattctcaaagaggctagcagattcgtctactaccttgtccttatagcgagctggcagttcttttgggtaaccaatataaggtttgataacgttgagtttgacgatagctttttctcgtgtttcaggtgtcagccagtcattcttagccaaacgttccttataaacgtcaatcatggtcgccacttttttctctacgtccgccttggcttctggagagaatttttcgtgggcataccaaagaccaagggcttgtttgaatggtccttgagctaagtggtaagctgccttgcgtttgtcttgagcctctggaactcctgaaagagctcgtccgtaggcacctgacaagatacgaatctcatctgtcaaatagctcgttgaaagattgactacacctaagatcaagcctgccttgagcaaaggccaagcttcttcactatagaattgctctgctgcttgccagaaacgttcctcgtctacgataaccttgtctggtgcttgtccaagaacatcttggaagaagtcatccaaaggtagggcaggcgcaaatttcttgaaatcttcgtaatcatatggatggtaaagtttagcatactctgaactttcttcattagagagcactactaccgcgattcgacggtccaattctagtcttttctcaagcaagtcttcaatttcttcatcagagaaatcataagccttgaggagatttgcgctagtttctttccaaagagtcaagagttcctctcgctgaggatggtcttcagaatagtaggtcgtatctggcaggattgtgcttggagcactggcccataaaacgttgattctggcatccataaagtctggtgatactccaaatggaaggaagtttggtttaccagctaattcaaatgctgctagtttacttgcgaaatccgcaaaactttctaaattctggtattccttcaataaaggaaggactggttcaattccatctgcttctcgcttatcgaaatctctgaccatactatggtacttgacaaaatttgccaagatagcatcctcaggcacctcttctcctgccaaccacttgtctgttgtcgccagcatcaggtcttcaatttcctggtctaaatcaacaaaacctccagtttaagacttatctgctgggatttcagctgttttctgccattccccattgattgcatcataaaaatcgtcttgataacgtgtcatcttgttctcgctttcatttgtacttgcttttagcttaacaaaaattacttgggaatgcaattaaaaatgaactgatattttctattgtttttcagttattattttaattttttcaaaaattaacttgacttaattttttttttaatgtatattaagaggcaggaggaatacaactgtatgatacgtatcgaaaacctcagtgtctcctacaaagaaacgttggcacttaaggatatttcactagtgctccaaggaccaacaattaccggtatcattggtccaaacggtgctgggaaatcaacattattaaaagggatgctgggaattatcccacatcaaggtcaggcatttctcgatgacaaggaagttaaaaaatccttacatcgaatcgcttatgtcgaacaaaaaatcaatatcgactacaactttcccatcaaggttaaggaatgtgtctcgctaggactctttccctctatccctctctttcgcagtttaaatgctaaaccattggaagaaagtgcaagaggcccttgaaatcgtcggtctagctgactacgctgaacgtcaaatcagtcaactatctggaggtcagttccagcgggtcttgattgccagatgtttggtgcaggaagctgactatatcctcttggatgaaccctttgttgggattgactctgtcagtgaggaaatcatcatgaatacgctgagagatctgaaaaaagctgggaagacggttctcatcgtccaccacgacctcagcaaggttccccactacttcgatcaagtcttgcttgtcaatcgagaagtgattgcctttggtccaaccaaagaaacctttaccgaagccaatcttaaagaagcttacggtaatcgactctttttcagtggaggtgacctatgattgcagaatttatcgatggattacaaaaattccatttcctacaaaatgccttgataacagccattgtcatcggggtcgtagctggagctgtgggatgtttcatcatcctacgcgggatgtcactcatgggagatgccatttcacatgctgtcttgccaggtgtagccctctcctttatcttgggccttgacttctttatcggagccattgtctttggactactagctgctatcatcattacctacatcaagggaaactcgattatcaaaagcgataccgccatcggcattaccttttcttctttcttagccctcggtatcatcttgattagtgtcgctaaaagttcaactgaccttttccatatcctttttggtaatatcctagccgtccaagatacggatatgtttattactatgggtgttggggcagtcattctcttgttaatctggattttcttcaagcaactcttgataacttcctttgatgaactcttggccaaagccatgggaatgcctgtcaatttctatcactaccttctcatggtactcttgactctcgtgtctgtgacagccatgcaaagtgtcggaactatcctaattgtagccatgctgattaccccagctgcaactgcttatctttatgctaatagcctgaaaagcatgattttcctttcctcaacctttggagctactgcttcagttttgggactctttatcggctatagtttaaacttagcagctggttctagcatcgtgctcacagctgctagcttcttcttaatcagtttctttatctctcctaaacaacgatatttgaaactgaaaaataaacatttgttaaaataaggggaaagcccccaataaattggaggatctaatgaaaaaattaggtacattattcgttctctttctttccgttattgttcttgtagcatgtgctagcggaaaaaaagatgcagcttctggtcaaaaactaaaagttgttgccacaaactcaatcatcgctgatattactaaaaatattgctggtgacaagattgatcttcacagtatcgttccgattggacaagacccacacgaatacgaaccactccctgaagatgttaagaaaacttctgaggctgacctcattttctataacggtatcaaccttgaaacaggtggcaatgcctggtttagcaaattggtagaaaatgccaagaagactgaaaacaaagactactttgcagtcagtgaaggtgttgatgttatctaccttgaaggaaaaaatgaaaaaggaaaagaagacccacacgcttggcttaaccttgaaaatggaattatctttgctaaaaatatcgccaaacaattgagcgccaaagaccctaacaacaaggaattctacgaaaaaaatctcaaagaatatactgataagttagacaaacttgataaagaaagtaaggataaatttaataacatccctgctgaaaagaaactcattgtaaccagcgaaggagcattcaaatacttctctaaagcctatggtgtcccaagtgcttacatctgggaaatcaatactgaagaagaaggaactcctgaacaaatcaagaccttggttgaaaaacttcgccaaacaaaagttccatcactctttgtagaatcaagtgtggatgaccgtccaatgaagactgtttcacaagacacaaacatcccaatctacgcacaaatctttactgactctatcgcagaacaaggtaaagaaggcgacagctactacaacatgatgaaatacaatcttgataagattgctgaaggattggcaaaataatactcttcgaaaatctcttcaaaccacgtcagcgttgccttgccgtactcaagtacagcctgtggctagcttcctagtttgctctttgattttcattgagtataagcctctgaaaaacgtcattctcacatgagctggcgtttttttctatgcccatatttccggtcaaatcattggaaaattccgactgtttcagctaaaatggaagaaaaaagattggagtatcttatggtaacttttctaggaaatcctgtgagctttacaggtaaacaactacaagtcggcgacaaggcacttgatttttcactcactacaacagacctttctaaaaaatctctggctgattttgatgggaagaaaaaagtcttgagtgtcgttccttctatcgatacaggcatctgctcaactcaaacacgtcgttttaatgaagaactggctggactggataataccgttgtcttgactgtttcaatggacctcccttttgcccaaaaacgttggtgcggtgctgaaggtattgaaaatgccatcatgctctcagactatttcgaccattcctttggacgtgattatgctctcttaatcaatgagtggcatctattggcacgcgcagtctttgtcctcgatactgacaatactattcgctacgttgaatacgtggacaatatcaactctgaaccaaactttgaagccacaattgcagctgctaaagccctatagaaaaaatcctctgtcacaaagagttccctactctttgaaacggaggattttttgtttacgagtaaatataagttcaatcagataaaagcaactaccttactctacagatttcaaggcttcaagcatatcaacctttctcagatgatgattgacgaagaaaccaagcaaggtcaaaatgatgcttactgctgccactgggattacatagacttcccagcctacctgcggataaaagagaatagtagcaggcgaaatcatttgaatcaaaaattgatgtaaatagaaaccagataccaaaccaagtacgattcccacaagggacagcacaatcgtctcacggtaaatgtagagggtgacttcattattatgaaagccaagaaccttgatagtggagagttcacggattctctcagctacgttgatattggtcagattgtaaaggataacaatagccaacagaaccgatacgatgaccaagatggtcatagtctgattgagtgagctagcgacggagtcaaagagtcgaatggctgaagcattttggacaacgctggacaccgcagcttgattcataagtaagcctgcctgcctttcaatactagtagcactggtatcccttagcataaccagataagtgttgacttggggtaactgtccgtaaatttgctcatagctagcctgactcatataaataaagtgaccaacgtagttctcagtaatggcagtgacctttagctccttaccttcaatttctagactctgcccaaccttgacacctgccaactgggctagtttagctgtgatgacaactccatcttttaatgtcaactcttgctgatggtcttgcagatggataaagggagtcaaatcctccttatctgtcatcataagagtaatggtttgaagaccagccttacctttgaaatccttgtctagcgtcttagaataaattttctgataggctttgatgtcctgccctttcaacacttcttctagatttaccttgtcctgattggtcgcactaggattttcagagacaatcatctgatactgttggatttgttgaaactgtttagacggaactcctgctacagaggattggattcccaaacctgcaaaaagcagagctacagaacctgccacaccaaagatcgtcatcaacatccgctgcttataacggaagatattgcgggctgttaccttatgagtaaaactgagacggcgccagataaaactgagacgttccagtaagattttggctcctttaacaggaggtttaggcagtaaaagctgggctgcttcatcgtgaagttccctccgagctaccaagtaggctggtaacacactcgccaaccaactcaagacaagagccagtaagctataggtccaatagaactgaatctgggtttttcccactaccataccttttgtaataacacttgaaatcacaccggctagtaaataatgtccaagtatgctacctagagccgttccgacagtcccagctactagaccgtaaaggagaaacttggcaataatatccttgctacgatagcccaaggccttaaaaatccctgcatgtgttcgctcttcatccacaaaacgagtcatagttgtgaaggtcaccatagccgctacggcataaagcactacaggaaagatattgcccactgcccgaatactggctgaagcattactgtacatgaggtagccttgaccgccaggcatggtttgccgattatagacttgatacttgggctccgccaaatcatccaagacttgctgatgtttttctaatttttccttttcttgggctaaattttgttcagcctgctttagtttatcctcttccttactcaattcctgcttagcttgggtaagttgagcactggcctgctctctctgagcttgaggcaacaaggctagttgactttcctgagcctgtaaacgagcttgagcagctgctaaacgacgcttggcttcctgcagattagtctcagccttatcaagggtctcttgccccttatcgatagattcttgcccttcttttttcaagaattgcagacgtttcttgccattatctgacaaagcttgttcaaggtcttcctgatgttgcttggatttctcttcataagctgatgaaaaagcatttaagcctgctaaatcttgatatttcaagcgtgctatattatagactttctgatcaaattggctaggcaaaatcaccccataggctgtcagagttccgcttccacttgctgcgtagcccatatctcgctgggagaggatttcagctgaatctacaaaaccagtaatggtataagtatgatcttttaaagaggaatgaccctcttctttttctttaaaactaatctcctgtcccacgctgtattggccttgcaaatgagtagccaaagcgatttccttgtctgactgaggaagtcgtccctctcttaactgaaaggttgaaattcgctctggtttagaatacagcctaatggcatcctgcccattatccatagtcacatctgtcaaatagccaaactcaacctctgcgccctctatctgttctaattcttcttgatctgcttgatccaaaccatagttagacatgactgccaaatccaaggtttgagcagttgttaaataagcattagctgttgcctccatgttggggctagtcactttgaggcctacaagggctagagaccctaacatcatcaaggtcaagatggataagaaacgccccttggagcctgtgaaggactgaattaagtccttccaataggtttttcgcttgatcatgctagtactccaaactgtcgatatcctgaggatgctggttcatcaccacatccttgacactggcatcgtgcatatgaatcacgcgatcagcaatgggcgccaaagctccattgtgagtcacgataatcaccgtcgctcccttttgacgagacatatcttggaggattttcaaaacctgcttgcccgtctgataatccaaggctccagttggttcgtcacaaaggagaattttaggatttttggctaccgcgcgtgcaatggagactctctgttgctcccctccagaaagctgggctggaaagttattgagacgatgagccagacctacatctgtcaagacctgttcaggattcaaggcatctgtcacgatttctgaagccaactccacattttccttagcggttagattggaaactagattataaaactgaaaaacaaagcctacatcattgcggcggtaattggtcctctggtgggaactatagtctgcaatattggcaccatcaatccagatttccccctcatcattggtatccattcccccaagaaggttaagaaccgttgacttgcctgcaccagatgcacctagaataataaccaattcacccttttcaatctcaaaattcacatcacgattggccacaatctccgtgtccccaacctgataacgcttgtaacagtgtttcatctcaatataagccatcagactcaccctctctcaaacaaattacttcctattaccattataacgctttttcaactagttggaaactgcttacattctcaaatccttattaaaaggcagtctcaaactactgccttctaacatcttcttaaaaataaaattgaaccagatcgccttctgctgttgctaccgaaatacaatctttctctatgcatttcacttttgctttttcttgattcacttcaaccacactattttcaatacctggataagaaactcgcaattctcccccacttcttgataaaatggtcaactgaaagagttttttatccgcccacctcatgctaatttcaaaatgtccacgtgccattaagcctgaaacggaacctgttgaccatgcatcgggtagggcggctagaggtaccagataagctgtatgagactggagcaacatttctgccatgccactgctagcaccaaaattaccatctatctgaaaaggagggtggctacaccaaagatttggcaaggtggatgactttaactgctctgctaataatttatgggctcggttgccatctcctagacgcgcccaaagattgatcttattagccttggaccagcctgtaccaccgtctccacgatcattgaggctagcacgcgccgattcaagatactcttgtcccttgtagctaaagagatttccaggatagagtcccactagatgggaagcgtgccgatgctgggcctccactttctcattttgaaaatgttgctcttcctcctcataccactccctgattcgaccagattgagtgatttgaagaggattaagcaagtcaaatttctccttgacctcagtcaacaagtccgcatccagctccaattcttgagcagcctgaataaaatcatggaataattgccaaataagagattggtcataggtattgccaatcgaaatcggcccatgttctggagaataagacggagaagagacccaacgctgcgcctgctgatcctcatgtaaaaaatcattccaaaaacgaaccgtttccctcaacatgggataaattttctccctgagatagtcttggtccctataaaatgaataggcttcataaaccgtttgcatcatccacgcattggcagctggtgaccaaccccaatagtaatcccaaccaggtgccgtccaaccaaagggagtcgcttgagtatgaaccaaccaaccattctcctccccttcctgagagacgattcctgcataccttgcagccgctagacgaccatagacacgcaaatcatctatatagttgatgactggaaaagccgtctctagaagattagtaacataggctggccaataattcatctgcagattgatattcaggtgatagtccgaattccaaggaggattatcgaccgcattccagactccctgtaggttagctggtagagcatctgagcaatctctagaagaactaatcaataaataccgtccatactggaagaacaattcctccaaagcatgcccctcttgtggcttataattttttagcaaattatctgtagtggatgtgtctacatcagctcccaaatccaattgaacacgttggaataaggcttggtaatcctgaatatgccttgatttcaattgggcatagcccttttctttagctatctccaccaagtccttaacctgtttctctaaatctattttcttgcgataattactagcaggattttgggcaaaatcagtcttagcagccaagaaaagattggcataactggctcctgatatctgagccttatctgaccaaactctaatatccccatctgtttcccaagctaaacagctagcaaactgcaggtcattgtccttaactcttcccttcatcaagatatgagaatcagtaatatccaacttgcattccttgtaatcagatttttcctcctcatactttccatcagaagccaaatcacgacttagcgacagttctatagtaaaatctagagtttccgccccttccttagtaaagcgctgaaccaagagattatctggaaaactcgcaaaagcttcacgttcaaatttcgttcccttatagacataagaagtcgtcgcaagcgccttactgatattcagttgcctctggtaatccgtaacctgagacaaagtcgtaccttgctgactaaactcaatgtgaatatccccaaaggatagataggtcccatattgactcgtttttggcccgatcaggtgctgttcagccagttccttagcccgattgtaatctctcttttccaaagcctgccgaatctcagctaaaaaaccatactggtcctgaagatttccaccctgataatcggaactatcaggaagtggaccaccagaccagagacttttttcattaaattgaatcctctcagcccctataatcccaaatacttttgcccctaaagaaccattgcctattggtaaagcctcttcttcccaacccttatatgttgttgaagctggtctcttgtaggccaatacataatcttgttttttattccttatcatactaccatactaacataaaaagcctagaaatcaattctagacttacaattttttattttccaaggtagtattcagaaactacgttcaatttttcgtcgaattcgaataccaatggtgggaagttagggatttccacgtccatgatttcgtcgtctgacaaacctttgatgtgttttacaagggcacggattgagttaccgtgagctcctacgaatacgtttttaccatctttaagagctggagcgattttatcttcccagaatggaagggcacgttccaaagtcactttcaagttttcagcatctggaataactgaatcgtcaagtgaagcgtaacgacggtctgtgtgagctgagtgctcatcatcacgatccatgtttggaggcaatacatcgtatgaacgacgccagatgtgaacttgctcatcaccaaattgttcagcagcttcagctttgtttttaccagtcaaaccaccgtagtgacgttcgttcaaacgccatgatttttcaactggaacccacaattggtcagaagcttcaagagccaagttagttgttttaatcgcacgtttcaatactgaagtataagcttggtcaaattcgataccagcttctttgatcaatttaccagcgtcaatcgcttgttgtgtacctttttcagacaaatcaacatcagcccaaccagtgaaaaggttagctttgttccattcagactcaccgtggcgagcaaaaaccaattttaccattagatggattctcctttaaattttccgaggtttcccctcgtttatctattctattttacacaatttttcacaaaaaagctagtcaaaaccaaaaaggaaccgactgtttggcagtgggattgctttaaacaaatataagcaaatatgtgaaaagaaatttccatttcactcttgctaatctccttgctttttgttagaatgatgtcaaaaaataaaaaaggttaacattatgccacaacatctctttaaagaattggctcaactggagcaagtagaggctctagctctaggaagatcacgggctggacaagattttgacaaagactctgactatgatgtatatgtctacctcagtgctcccctctcgccagacatcagagaagaaatcctcagtaaatactgctcctatatggaaatcggcaatcaattttgggaattggaggatgattgtgttctcaataatggcatagagattgagctgatttaccgctctctagacgaatttgacaaagatttacaagccgtagttttagagcaccaagcccagaattcttacactacttgtatgtggtacaatctactcaacagcaagattctctacgatcgagatggtcactatgctgccctccagaaaaagtacaatcttccttatccagctgagctgaaaaagaatatcatcaacaagcaattcctgcttctcgaccaagctatgccagctttttcaagacaaatcaaaaaagctctcaaacgccaagacttactcagcatcaatcaccgcagtagcgagtttttcgcttcttatttcgatttgctctttgccttcaatgagcaactccatccaggagaaaaacgcatgctccagtacgcaaaaaacaattgctctcatctacctcaaaattttgaaaacgatattcaagactactttcaaaatctctaccaactagatcaccagcagaaaacagtcctaactttggagcatctcctatcaaatcttaaacatttgattgatgaatccatttagaacaccaacagataaaagctcatgaaatctacttttcagatgattcatgagctttttaaatttccataatatataacgatttaaagttatactaaatgaaaatcaaaaagcaaactaggaagctagtcgcaagctgtgctgaagtacagtgaggcgacattgacgtagtttgaagagattttcgaaaagtattaattgaaacaagaaaacgacaataaacttctaacatgataaaaacgcatcgtatcaggtgttcaaaaccttgatacaatgcgctttatagtctataagattagttgtcttttcttctcaaattgagttttgcctagacttttcaaccttatttctcttcaaatccttctgctactgcttccgcaaagttttcttctacgatgcttgcacagtggtcacagatgactgcgtggtagctacgttctgctgttgttgggtcgatacgacggcaacggtcacacacatcacctgcagcgcgttctactgtgaaggctacatcttcgaagctaacagcagcttctggagctggtccttctgcgatagtcaagtctgacacgattaaaagttgagccacattgctgtttactgcttcgagtagagttttcaccacttcatttgggtaaactgtcaagtgtgcttcaagtgatttaccgataactttggcattacgagcctcttccaaggctttttgagcttgtccacggaagtccatgaaggctgcccatgtatccaagatttcttcttgattagcaaaagtttgtgcttctggcaattctgacaattgaacgaagtcttctgcttcaaactcaaggtatgaccagatttcctctgctgtatgaggaaggattggtgtcaagagtttggtgattttcacaagaatgtcatagaagacagtctgcatttgacggcgttccagtgatttggcaccttcgatgtaaacaacatctttagcaaaatcaaggtagaatgctgacaagtcaacgttgataaagttcactagtgctttatagattgtcaagaattcaaagtttgcataagcatcacgaatggtcttgacaagctggttaaagcgaatcgtcatgtacttatcaactgaacgaagttcatcgtaagcgactgcatcttgagctgggttaaagtcagatgtattggcaatcaagaaacgaagggtgttacgaatcttacggtaagtttcagagacttggctcaagatatccatagagatacgcacgtcgttggttgagtctacacttgttacccaaagacgcaagatttcagcaccaaattgtttttcaacatcgcttggagcaatggtatttccaagagatttagacatcttctcacctttaccgtcaagtgcaaaaccttgtgacaagatttgtttgtaaggtgctacgccatggttagcaactgaggtgatgagcgatgagttgaaccaaccacggtattggtcagaaccttctaggtaaaggtctgctgggtaagtcaactctggacggtttactacaactccattccatgatgaacctgagtcaaaccaaacgtccatgatatcagtttcttttttgaactcgccgtttggtgaacctggatgagtaaatccttctggcaagaggtccttagcatcacgttcccaccaaatgcttgaaccatgttcctcaaagagttgagccacgtgttcaatcgtttcagcagtcatgatcgctgtaccgtcttcagcgtagaagataggaagtggaacaccccaagcacgttgacgagagataacccagtcgccacggtcacgaatcatattgtaaagacggactttaccccattctgagtggaatttcactttttcaatttcatccaagatttcttggcggaatttagaaactgaggcaaaccattgtggtactgcacgccagatgattggtttcttagtacgccagtcaaatgggtatgagtgagagatttcttcttgggcaagaaggaggttaccaagtttctcgataacagttggaactaccttttcatagaattgaccttcaaactcaggaccagcattcttcatcatgataccacgttcgtcaacagtcactgcgacttcaagaccattagcaataccgacattgtagtcatcctcaccaaaaccaggggctgtgtggacgatacctgtaccagaatcagttgtaacgtggtcaccaagaataaccaattcatctacagctgtatcccatgggtgttctgttacgatatggttgagttcttgaccacggtaagttgccaaaacttgaacatcagcccaaccaaatttctcagacaagctagtcaataattctgcagcaaccacaaacttacgagcttcaccagcaggttgaaccaaaacgtaatcaatatctgcaccaacagtcaaaccacgagaagctgtgatggtaaatggagttgttgtccaaactacgatataagtatctgtatctagaacacctttgccatcttttaccttgttggcatagtaaagggaagttgaaaccaaatcatggtattcaatctctgcttcagcaagagccgactcagatgaccaagaccagtaaactggcttagcaccacggtagatataacctttattagccatctcaccaaatacacggatttgagctgcttcatagtcaggagtcaaagtcacatatggattttcccagtcaccagaaacacccaaacgtttaaagtcttcacgttgtttatctacttgagaaagagcatattcacggcaaagtttcaagtactcaaccaagtccatttctttgcgtttgataccttgttttgccaaaacttgctcgattggcagaccatgtgtatcccaacctggaatataaggagcataaaatcctgacatagacttagaacgaacaatgatatcttttgaaatcttgttcatagcgtgtccaacgtgaatatttccgttcgcgtatggaggaccatcatgcaaggtgaaatgaggttttccttggttcaattcttgacgacgttgataaagttttgcatcttcccattcctgttgccaaactggctctttggtaggaaggcctgcacgcattgggaaagctgttttcccaaggttaagggtatctttgagtttcatggtatctcctttataaataataacaaattaaaaaccacgacttccaaaaaggacgaaaatcgtggtaccacctttattcgaaaaaagactcagcttttttcctcttatcccgtaacgtggggaacgtcaaatcttacttcattcagacttgattgtttgagaggataatcttatcattagggaatgcaggactcacaccatctcctgctcgctggaaatataaggataagatattgttctcagattatttcttataaaattgtaacagattcttgcggtgctgcaaaacctggttctgagtttacagcttcagtagctggtgttggtcctgagtaatggcttggagctacttctggctcttcatacattggaccaactggatgagctggactttcttcaacaaccggagctggtgaaaccaattgttcttgctcagctctagcttcggcttccgcaagttccttattagctgcttcgatacgcgcttgcaactctgccatttcctcgggagaaaactgacgagtaatatcaattggttcttcctcttgatgttgttgtaagacagaatcacctaagacttcacttaccacttctttgaaggcttcatcacttgtttgaagataagtcgctgttggacgaagaatgtcttcccaatctgaagattcaacaattgctaactggctctcaattgtagatttgagacgttgatggaaaacacggctcttgttcttcaattcttctgtttcaacagcaactttcttagcattatcagttgcttgacgaagaatttcatttgccttgtacttagcttcttccaacaaacgttgggcatcttgctctgcttgttggataatattatttgaacgttccgttgcagcttgttttactcgctctgctgtatcttgtgcaatcaatacagactggctcaatgaatctttcatctcatcaaagtaagacaaacgctcttccaaactcttaatatgtaaatccttatcatgattagagcgaaccaaatcttcataatcacggactacaatatctaaaaactcatctacttcttcttgatcgaaccctctgaagcgtgtgctaaaagttttatctttgatttctaacgatgtaattggcatatttttcctcacttacttaataacaattggaccgttaatttctttttatctttttttgtttgcccattatctctaacgagtttcactcgaccaaatttccttatactaatcaaatcaccaacttgaactgcataatctgatttttcaactaaatggtaattcacttggactgcctgtttttcaattaactgacttgcttgatttctagacagcttgaagacacctgctagaaaaacatctaatctagaactagcaatacatatatctaattcttgataatcttctacagtagcaattctctcagtaaaatgctgttcttctagatgaaccggtaaacgagcaattttcgtaatgccgtcttgaaaaaggagcataaactgtcgattaatgataatctgtgctctctcttcgttgactaagatatcaccaaatagcttcctatcgattcctagctgatttaaaacagttcctaatatttttgcatgcgttaggcgttcaaacttattaggatagactatttcttgcaaggaaagttcaaaatcagagaattccggctcaaaataatcaggatacaggagaacccgtacatattcagtttcaagaaactgccgactgctcatgtaggagatgccgttggttgatgctagcacctttaaaatcttttcttgatggggatttacaaagggtgttaaaaaaggagaataagaatcttctaccttttttatccattctaatcccttatcaataaaagacgaatcattcttagaaaagtgttgataaatcatcttgttcatagaaagatcactaaaagtcgaatcaactgctcccctaggaagtgaactagtaataccgcaatccagacagataagtcaagacctgcaatctggaggggtaaacgttgcaagggagctactatcggtttcactaaactaataatcaagcgtccaagacgtgattcataagcattgggaaaccaagacatcagagcaaacacgattaaaatcagtgaatagatatccactgcattttgaacaaaacgaatgagaaagatcattatctcactctcgtacgtttcatatcaaagccaaattcaccattttgtgattcatctggaattttgatgtcttcaatattgacgacaacatcaactggtgtcagcaggtacatagtagatgctacctttttcatgttaccagctaaaacatggcgtgccccgtccagataatccaaacaacgacgtgcttgaacttctgtcatatattggaaatcaatcaaaatactttcgttaccagctaataaatcaacaatatctgtggcatcttcgtatttacgtggataacgaacatcaattgtcaccttatcagtagaacgttgactttgcatagccaactcttgttgacgggcatgaagacgagtgatgtttttatctttagatggcgtgctaccagcttgttgaggcaactcttgaacagaagggactggagtcacaattggctcttcagctttaggctgatatgcagtaccaacatcttctccatcttctgtaaaataatctataaatttatcaaatctatcttttaaagacatatttctttcctatttaaaaaatgctgtaccaattctgacaaatgttgagccaaattcaatcgcttccttatagtcacgactcatacccatactcaagtccgtcattggcatattgggaatttgtttttctctaatttctagttgcaaatcctgcgtagctttaaaaatttctttcaactcatcactactagcttcaaaaggagccatggtcatcaagccgacatattcaattttatctaaggtggccaattctggtaagagctccaatagttcttcccttgaaaaaccatgtttgctctcttccctcgagatatttacttgtaagaaacacttaacaactcggtcacttcttttttgaatttcctctgctagctttaatgaatccaaagcgtggaaataatcaacatactgaatgacatctttgaccttgcgtctttgcaaggttccaatcaaatgccaggtaatatttctatcttttaaagcttcatatttctcaagaaatttatctacacgattttcaccaatatgatgcacacctagcggaagcaaagcctccgctgtcggtacgtctacatattttgtaacagcaacaaccgaaacagaattagcttctcttcctgcctgctgacttgcatcttttatttgttgaaaaacacgttctgtattttctttcaaattcatttacttaacgatttttgaaaaatggaggagtgtctaattcatcctcatcgtgtaaagatggtgcttcgaaacgttcaactggtgatacaactgaatcagttggtcgaacaattgtctcacgacgcaagtcccaatcaccaaatgctgaagattgagaagtttctgtacggcgaggtgctggacttggaatttctgcagtttcagccatatcaaactgacgattatgattgtgtgcatgactaggacttgcttgttcatgacggacaacttgtcttggtgcatggcccacaactttttccacacgatcttgacgaacaccagttgccacaactgtaacacgaatttcatctttcatgttttcatcgatagatgttccgagccagatgttcactccttgaccagctgcttggttgacaatttctgatgcttcttcagcctcaatcaaggttaaatcaagaccaccagtaacgttgacgataacatcctcagcaccgtcaatagttgtttcaagaagtggtgagtagattgccttacgagctgcttctaccacacgttcttcaccactaccgataccgatacccattagggcgtttcctttatttgccataactgttttcacatcggcaaagtcaagattaatcaaaccagggtttgtgatcaaatcagtaattccttgaacaccttggcgaagtacgttatctgcttcgctaagagcttcaagaagtggagttttcttatcaacaatttcaagcaagttgttgtttgaaataatcaatagagtatccacatgctcacgaagttgattgattccttctacagcatactgaccacgtttgcttccttcaaaaccgaaaggacgtgtcacaacaccaactgtaagagcacccaaatctttagcaatgcgggcaataacaggagctgcaccagtaccagagccccctcccatacctgcagtaatgaagaccatatctgctccagtaatagcttgagtcaaggcttcttcgctttcttcagctgccttttgaccaacttcaggtcgaccgccagcacccaaaccacgagtcaatttagggcctaactgaattacagtctcagcttttgtactactcaaagcttgtacatctgtgtttgctgcgataaattctacgcctgcaacaccttcgtcaaccatgcggttaatggcgttaccgccacctccaccaacaccgattactttaataactgcaccttgagctgctgctgtatcaaatgaaaatgtcatagtttatttttcctcttttattcatcaaacatgcttccgattaagccacggaaacgatctgcgatttttggtttattttgagaagatactttatcttctttcggagcaactacgttcgtagaagctgattgctctacctcagtattttgaactggttgaataggggtcggttgtgctacctgcgtaacgcgttgaatcatcccaccgaaattaattggttggtgacgcaaagtatcctcacccttgactgctctttgtgctaataaatgcacctcagtcaattgaccagcaaattcagacaagctaatcacatgagcgaaggcaggattacggattccaacttgatttggaacgtaaagtttgacaccaacgccaaagacttcctgtgcaagttctacaatacctggtaaaatagcatttccaccaatcagaacaatcccacctggaagatccaacaaatgtcttctttccaactcttgtttgatttgttcaaaaatgtgcttaatgcgggctgaaataatctctgctagatagctttctgtaacttctacaggttctacttcaccaattacttcaacttggaaggtttcattgcttgcaagtgaagggtaggcttcaccatagtttaatttcaatccttcagctaatttctgtgaagtcttcaagactttagagatatcttttgtgacataatctccaccttcttgaagaatatttgtaaactggagttcttggttacggattgtagcaacagttgtttgacctgctcccatatcaatcacagtagctccaaattcacgctcaccttcattcaagactgaacgaaccaaagccaatggtgaaataataatattttcaacttgaacacctgagcgctcaactgtcttgcgtaaattgtgaagaatagtacgtggacctgtgtaaagcaaaccacgcatttcaagacgaacacccatcatgccgcgtgggtcacgaataccttggaaaccatctacgataaattcttctggaataaaagtaatgacttcacgatctggtgtcatactctttgtcaaggctgatttaacaacattttcaacatcttgatctgtaatttcttttgtatcagatgtaactggaatcataccttgagttggttctacttgcaaaagatttccaggcaaaccaacattcactgatttgattgaaatgccagctttctcttctgcttgggaaatagctgacttgatagcagttgctgctgcttcaatatcaacgataatcccatcctttacacctttactcttggcattacttacaccaattacgtttagttcaccatttctatgctcggcaaccaatactttaatcgaattagttccgatatctaagcctgtaaaaaaaccatctctagccattacatcgcatcctctctcttccaagtttcaaacttctattcaatatagctaaaatagggcatagctattcacagaatattataacacaaaaaatccaatcgtgcttagtttttcctaaatttacttaccattttttcacattctttccttagctttttttattttccaaacaagttataaaaaatcagatttatgaaaaaaagaaagctcatttctaagctttctttgcaatcattttttctgcttcttgctctaaaaatagttccaagattttctttgttaacgtaatcgctgctgataaggccagggaaacgattaaataattagctactaagccatggtctccaaccaatggtggttttgtcaagaatccgtaatctccacctgttactaaattgaccacaaaaatcaaggcatttagtgcaaaggtcatgagaaaaattcccttcacatccagcaatcgcgcgttatactgtctcaatagataaactaaagagttccccaagagagctaagtggccaaagataaaggataaaatcgtaatatgtgggaaaggataggcatctgacactggataaacaaaggctgctaatgtcccaaatgttcctagtaatgcaaaatactgcctatatttggactgaccaggtagcaagagcaccacaaacatagccatacgacaatggtaaaagggtaaactttctgacagaggcatatgattgaccccataccaaccataaagcaggatcaactgaaccgcctgcaagatttggaaaaatcgttggtaagccttcttttcacgataacgataggctgtataaaaggtcaaagccaagagtgtaaatatactgacataccaaaaaaggtcaaatttgggtggctctgttgcttgggtcgtaaagaaaatatcccataaattcatctagtcttcctcatgattcaaaattttcctgcatattattataccatgctatttgtcaaaaatggatttagaaatacgtaaatgtttgacaaaatcactttgcttcattttctaaactttctaacaacttggctagattcatagagttagagcctttgagtaggatttggtcattgactccaaggctttctttgacctgcttaactaggtcttcaaattggtcttggtcttctgttttcttgaagtagtaaacgtggccgattgggaacatttgactggccagttgagccaattcagcaatgtcttctccgtagaaaatcacggtatcaagcacatctggtgagaggctcaaaatcatctggttatggagctgaacagactggtcaccgagttccttcatgtccgctaagacagcgatttttttgccaccttcgttggctggaatagccgaaaaagtctctaaaatcaacttcatagcagttggattggcattatacacatctgatagaatatctgcaccattggctgctttcttccactcagtacggttacgcgtcaattcaagattttggaaggcctgacgaatttgctcctctgaaactccttcttgtagggcaacataggatgcaatcatggcattagtagcattgtacttaccagtcactggcaaatcaagggcttgttccaagaaattagccttaaatgtcagactatccttgcgctcaatcaagtctgtaatttccaactctgctccttggccaaaacgaactacctttttgtcagttggcaagtagtcctctacaatcggatctgctggtgccaagagcaaggaattcgaagacatcccgtctgcaatttgcatttttcctttagcaatctccgaacggtctttgaaaaaggccaaatgggcttcgccaaccaaggtcacgatggctgtttttggatgagccaattcagacaagagatggatatctcccaagtgatcctgccccatctccaagaccaacttttctgttccttcaggcatatggagaactgtgtatggaagaccaatctcattattgtagttaccttgtgttttgtaggtcttgtaggttgttgatagcaagtgcgctaacatatccttggtcgttgttttaccatttgaacccgtaaccgcaaagacatcaacagctgttttttcaagatagtaggctgctagttgctgaaaggcagtcagaacatcatctactagaatgtagggatgatttgcgacctttttctcagacagggttactgctgcaccattttcaaaggctatttcgataaagtcatggccatcacgcgcacctttgaggggcacaaataaatctcctgtcgcaatcaaacgactgtcaaactcagccttttctaactgagcatctgcaaaaagactgacattatttttagctccgacaacttgagccacttcatggattgttaatttcatttctactcctttaaaaagggtcgaagctcgagaactctagtcacctttcagtgatggttctggcttctaccctctctttcattttatagcaaatgcgcttcgcgcttgtcaaaactttccttggcaaggtcaaccaaacgctcgattagttctgggtagctgattcccatattgtcccaaagtagtgggtacatagaccactgggtgaaacctggcatggtattgagctcgtttaggaaaatctctcccttatctgtatagaagaaatcacaacgagatagacctaaaccaccaatagcacggaaggcagtttctgcattctgacgcatgacagctaccacatcatcactgattttagctgggatatccatggtaatcttgttatcaatatacttggcatcatagtcataaaaggcaacatccttaactacttctcctggaagcgtgcttttaacatcgtagttacccagtaggccaacctcgatttcacgggcatttaccccttgttcaaccaagacacggctatcatattggaaggcaagtttcaaggcttgacgaagttcctcttgattttcagacttagaaataccgacactagaacccatgttagatggttttgtgaaaactggataagtcaatttttcttcaacttcagcaattttagcagtcatatcatcaccttcgacaatggccacataaggaacttgggcaatcccgacagattctaacacacgcttggtcgtgattttgtccatggcaaggctagatgacaaaatgttgcaaccaacataaggcattttcaaaacttcaaggaaaccttgaacagagccatcttctcccatcggaccatgaaggactggaaagaccactgctccctcttcatatatggcacttggtgcaactttcttatcccaatcaatggtttcattggtcataagacgatcctcttgacctggagtctggttaaattcttgcgttttaataaagtcacctgactggctgatgaagaaagtcttgactgtgaaacgatcgtagttgaccgcacgcataacactttccgctgaaaggacagagacttcacgctctgcactacgcccaccgtataaaagaataatcgtttgtttcatattatttgttccaattctaatagaatacttgttctttagtatatcatatttgcttcttttttgaaacttgaacctgatactggtcttcaataaatctaaaaagagaccgataaaacaactgtcggtctccgtgatttttgtataaatgaattgagtgtgttaatttgtctagacttacaactctgttcgattttcaatggctcgtaagagtgtcacttcgtccgcatactcaatgtccgctccgacagcgagacctcgtgctagacgcgtaaccttgataccagctggcttgagcaaacgagaaagatacatggaggtcgcttcaccatctgctgtagcattggtcgccacaatcacttctgaaacttcactatccataagacgagtcataaggctcttgagattgatatcgtccggactgataccattcatgggagaaatgagtccatgcaagacatgatagagtccatggtattcttggatattctccatggctgccacatcgcgactatcttcgagaactaaaatcgttgtctggtcacgagtcggatcggtacagatagaacaaggatcgtcgtctgtcaaacgtccacaaatagaacagtaggtcaattctctcttagcagaaaggagatttttagcaaattcattgacatcatcatcagacatcccaatcgtataaaaggccagacgggtagccgtcttaatcccgatacccggtaacttagaataactatcaattagcttggcaataggtgttggataaagcatatgttcctttctaattcattggatgatgttggttatagaggttgataatatcgcgcgcaatggaaggtccgacaccatttgtaaggttggtgttatgagggaagacaacagctacagcgatttgaggattatctgatggtgcataggccacagcattagtattgttagctttttgaccaccctcaacataactttcggcagtacctgtttttccactaatggataccgctgcgccatttgaaaaggcacgaccggttgtcaaagcacttccaccatgtgaaacttgataaaatccttgttgaagaatggaaacatcagactcagaaatattaattttattcatttccttggtttcaacagattggattaagttccctaaaccaccttgttcgttgtttccataaatcccctcgacaatgtgaggtgcaatccgaacaccgttgttggcaatggtgccaacgtactgggctaattgcataggggtgtagttatcaaactggccaaaggcattggtaatgtaattagcaaaattatactcttttggtataaaaccagttgactcatctggaaggtcaatgcctgttgaggctccaagaccatattccgcaaatgtcgagcgaagtttccccatggcggattctaaattgttagttagaacaaacatattgggttgataggtctgacccataatgcccaaagccgtttgaaccatataggtattagaagaatactccaaggcttccacagctgtaatcgggaatgaaccgtaagcctgagtgtaccaagaattaatcggagctgaaccttggaagacaatcggttggtctgtcaaggtctgattccctgataagactccattctcccaaccagagctgatggtcgccgccttgacaacagaacccggcacaaagacattggttactgttcccaaggaatcaggtgttaaatctcccgttttcaagtcatgttttagccctgacatagacaaaaccgcacctgtttttgggttaagggcgactgcatacacaccttctgaatacttggctcctccatttcccagttcggaattgaaataactcttaagcagattgtccacgctatcttggaaggccaaatcaatagtcagtttaatattattccctttggtaccatcttcgatattttcgacactttccatgttaccgtacttatctagatggatttccttaactgagcgttttccttgcaaggtttcttcatattgtttttctagataagaagtcccaacacgatcatttaaagaataaccctttttgatataagcatctgcttcttcagctggtagaccagctttttcactggatacacttcctactatagacgaaagagaagtctctaggacctttcgatcccacgaagttgaaatactgataccaggtaaattcttagaagccgaagcaatcaaggcaatctgtgtgtttgacaaggaatctgtcgcaatggtgcctgtcgcaaaatttccaactgcattgagttggctaaagagataaatttctttcttttcgtcatccgagtaagccaattgacttggatcgatactttcaacagtattattgtaaagctcagattcagataattgattgccatcagaatcaagtcgcttctcacgtggtaaactttccactgctttcttatatacatcttgatctgctagataatagtccgccaactgtcgatcagtcaatgttggagaagtaactcccacataagccagcaacttcttggctgtttcttttaaatctgcagccgtcattttgttgtttcgagtaaaggaaacgacttgtttcacagtattttcaaccaaaggcttgccactagcatcataaatttcgccccgagccgaactagtagtcacctttgttttactagcagatgctaattttgtctcataaaaatccttgttcaaaacctgcatataaagcaggcgaccaataatagccataaagagtaaaatgacaatcgaaaacaataaattaagccgaatcggaatcgaatggctgtcaaattttctcatacaaatcagtctcatttctatttaaaatcttactcttcattgtaccacaatttgagcagaaaattatggaaaagcaagaagctttttttcgtttttacagtaagatacgtttttatttattcatccctatattatatgttataatgaatgtaaaagttcaataatctagtctttttccaacacgactcatttaaaggagcctttctatggacaaaccagatatagcaaccatcattgattcccacttcgaagaaatgacagacctagagcaaggaatcgctcgctattttttgcaagctgaaacgattacagatgatttatcttcccaacaggtcactcaaaaattacatatctctcaggctgctctgacccgcttttctaaaaagtgtggttttacaggctatcgagaatttattttccaataccaacaccaagcagagaaacaggacacccattctcacaaacacagtccactgacaaaacgagtccttagaagttatagcagtatgcgggaacaaacacaggacttgattgatgaagtccaactagaaagaattgcccagttaatcgaagatgctgagcgtgtctacttcttcggaacagggagttctggcctcgtagctcgtgaaatgaaattacgcttcatgcgtctaggtgtggtctgcgaggctttaaccgatcaagacggttttgcttggacaaccagtattatggatgagaattgtctcgtactcggtttctctctttctggcacaaccccttctattttagatagtctattagacgctaaggagatgggggcaaagactgtactttttacaagtgttcccaataaagatagtcaggcctatacagagactgttcttgtagccacccacagccagtcatcctacatccaacgaatatccgctcaacttcctatgctcttctttatcgatttgatttatgcctactttttggaaatcaatcgagaaagtaaggaaaaaatctttaatagttactgggaaaataaaaaactaaacggctatcgtcgacaaaaacgtgtaagaaaatcctagtttggctcagccaaactaggatttttattcatcactaaacatacctcttctagattatgaattagtcatatcttgacttggtcttgaataatttcatgtaatcactttttgaagggagtaaataagcaagtctgacggtatcctcaacaattgtatataatacgatgtaatccttactcaaggtcaatcctcgcgtttggtagcgagggtctaatttcttaccaaatttttcatcggcatcaaatccagcttgggggaaaatttctagacgattaatatcttttctaatactggctacttttcgtctcgcagcctctacagaaccaatttcctccgctatatactgatatattttgtccagactatcaatcactctaggagaatacaaaatccgatattttttataatccatagcgtgtcacgacatcctcatctgtcaagtaatttccagcctcaatcttggcataactttcttgaacttctgcttgtaattgtctaaacaaatactccttctctaattcctcttcactcagtaaatctacttcatttgttacggcaacattctttaaaaataatctgagtgctgatgaaagagagagattttgttcttttaacacttccatggcatcatttaccaattctctattagcttggaaggtcacaattttatttgaattcgctatagccattttatataattcctttatatattttatttattatctcacaattataaagaaagtcaagggaatttgatcagaaaatcctagtttggttaaaccaaactaggattgttttgttttaaagtgataataagctcctaacatacctgctgtattttgatgatgggcaaattctaatcgtgttttttcagcaaggcttggtaccaaagcatctttcaaagcttttcgaattttaggcttgaggatagcctcttgccccattataccgccaccgagaatgactacttctggattggccacatagcaaatatttgccagaccttttcctagatagtctaccatccggtcaataccagccatgcagattttgtttccttcagtggcttccttaaagatacgtcgaccattccactggtcaactggatctccatgacctgctgctacatactccaccaaggctgtcgtagaagcaagatcttggaaagcaccatcctgcatgtgcatataaccaacttcacaggctgaattgctaaatccatggaagactttcccatccataatcaagcaacccccgatacctgttccaatagtcaagcaaagagtgacactcgctcccttgcctgaaccagataccgcctcagccagacctgcacagttgacatcattttcaatctcacaaggaatcgcaaagctagtctcaatttccttcttaaactgagttcctgcataattagggatttgagggcctgcatagaaaatctcacccttgtctggatctaccatcccagcagaagaaatggcaacacctgctactgggcctttttctaaatagctggctacaatatctttggtcttttgtaagatatgaggtccaccctgatgcgcctctgttggcatttcatgcgattcaacaagttggccttcttggtcaatcaaaccatatttgatgttggttccaccgatatcaattgcaacgtagtgtgtcataaatacctccttatgaattagaggaagcgctccttggtttcacgaatcaaggctgcagctgcttctacaactggacgatcgtcttcagtcactggtgtcaatggtgaacgaacagaaccaatattcaagccttcattgatcttcaagacttccttaatcacaccgtacatatttccatgtgcagcagtgagtttaccaatgatagcgttgatagcatactgcaattcacgcgctgtttccaagtctttgtcagcaatcaactgattgagtttcaagaaaagttctggcatcgcaccataagtaccaccgataccagctttagcacccatgaggcgaccacctaggaactgttcatcaggaccattaaagacgatatgatcttccccaccaaggctgacaaaggtttggatatcttgaactggcatagaagagttcttcacaccgataacacgaggatttttcaacatttctgtgtagagacttggagtcaaagcaacacctgccaattgaggaatgttgtaaatcacgtagtctgtatttggagctgcagaactgatatcgttccagtatttagcaactgagtattctggtaagcggaagtaaatcggtggaatcgttgcaatggcatctacacccaagctttctgcatgacgagctagttccatactatctttagtattattgcaagcaacatgggcaataatagttaatttacctttggcaactgccatgacttcttccaagattaacttgcggtcttcaacgctttggtagatacattcaccagaagaaccattgacataaagaccttgaacacctttatcaatgaagtattgaaccaaggcacgcgtacgctctggacttacttctccttgatcatcataacatgcgtaaaaggctggaatgacaccttcatatttttttaaatctgacatagattttctcctaagttttctttttttctgctaaaagcaggatttattctttacgtgtttagtatacaccttgtgaaaaacgctttcaatatcttgtgtacacttagattttagtttcgatatgtattttgaaatgtttatggcttgaaagtagtttcagaaacaagccatcctattggtattttgcgaaaattttctccatcaatccagtctggataaagaccaagagtccaaacccaaaaagtaggaaggctgagccacctaaaagtaaactgaaggcggacagataaagaaccatcacaatgagaaagagaataactaacatgagaaagaaccaaggaaagttgaaacttgccaagataagtcctttttgtagcacttctttccaagtcaaatcatagcgcgcagctatagggtagctagccaacatcacgatagtgaggaagataagaacacctagacaaatagcttttaccatttggaaaggcatagctgtctgcccccaaaaaagatagaggtctaaaatacttaatgagacgatacccaactcaagcagacctaactgaagacctagtttcagattttgcttgaaagctcttagatagattttaaagacaggcacacgtctactcttcttaatctcaaacatagtctcgtaaaggctaattttagccactccaatcgtcacgatgggcaaacaagagacaacaaaaagaagattggctgtcacgatatccaagaccttctcactaaaacgcatgagaaagttatctgtatcaaatgctgccttgataaggcttactcctttttgtgccatgtctactcctcctgagtttttaatcaatcaaaattttaaagagatatttgcgaaccttctcttccatacctgcatagccatttggctggtgtggttctcctgggaagaaaatcgcaaaattgtgataacccaacaagagtgggtagtgttcatgacaatgcacaaagccaatgtcacttgcttcgtcgaatgctactgcctcgtctttgatacgtgaaccgtaactcgaatattcatgtccttctaccagtaaatgcaaatctgcatagttctgatgatgctcaaattgatcattttcagcttgattgaggacattttcctgaacaactagaaagaccttgtccccatcaatctcatactttcctaattcgaaagaatccttacggtgctgatagagatagtcgatagccttgtctagattgggatgaattcctttgtaaaaggtgatgtttttcaaatcgtcaaaaatcatactctttccttcgtttctgatagttaactaaaatcataaattaagtttataagtgtctaacagaatctctaaggtaagcaaatacccaacattttgtagacacttataacatctatatttccatagcatgtcaagaccacttccgcaatcttgacacaccagtttacttttcttaacctttgaccgctcccatggtaataccttgagtaaaggatttttggaagactaggaagactgttacgattggcacagcagcaagagctgcacctgccatgatcaaaccatagttggttgccatttcagcctgcatagtcgcaacaccgagtgaaatggtcaaattattacgtgaagtcaacataaccaactgcatgaagtagtcgttccatgtattgatgaaggtaaagattgcaagtgctgcaaatcctggtttcacaattgggaaggctacgctccagaaggtacgaatctcaccacaaccgtcgattttagctgattcaagcaactctgtaggaatattctcactgaactgtttcatgaggaagaccccgaatggccatccaatcaaaggcaagataactgcccagagagtatcgtgaattcccatgaagttgacgatacgtaccaatggtacaaggacaacttgttttggaagtgccatagcagcaataaagattgcaaagagaatacgttgcccatagaaacgttttttagccaatacataacctgctagagatgaggtcgcacagactaagaacatggttaccaatgagataaacacagagttccacatccactgcatagcagggttttgcaccatgagttgttggaagttttccatggttggcattttagggaaccattgtggtggaataacgatggtatcaggttgtgatttgaaggcccctgtcaaaatccagtagaatggaaagatgaacagcacggtcaacaagagcaagataatagttgaaataacagtgaaagctgttataggtttcttttgtgtagattgcatagctgtctcctttctttaatattctacgtcatttccgagcgccttaaattgaacaaagcttacaatagcaatcatgactgccaagaagacaccaatggtattagcatacccgtattcggtcaattggaaggctttttcgtaaaggtagtacatcaaggtacttgttgagtagtttggcccaccagatgttaatagttgaatcaaggcgaaaacttgaaatgagttaattgttgtgatgattgcgatgtagagagttgttggaagaaggcttggccatttaatcttccagaaaacttgaaattcagttgcaccgtctacacgagccgcttcaaccagtgaattgtcaatattccccatagcagctatgtagaggatgattggttgaccaactgaagttgtcaagaggataatcataattgccagtaatgcccagtgtttatctcccaaccaagaaatattctggctgatgatatggcttgacttaaggacaaagtttagaatccctgataatgggtcataaatccatttccaaacaactgttacggcaacactacctgttacaacaggaaggaagaagacgaaacggtagaaagatctggcaatagcattttgatggtaggtttgcgacgccacaaagagcgaaaagagaacaacaatcggtacagatccaacaaccaaaataactgtgttaatcaaagacttcataaagacagggtctttaaacatacgaatgtagttgtccaatcccacaaactcaaatttagtcattgaatagttaaagaaacttgtaatgaatcccataatcataggaaccaatacaaagatgacaaagaagaataatactggtgctaagaaagcgtaggaaatcactgtttcccgcatacgaattttattgactttcacagtcggcacctctctttcacaaatagaatattttggattttcttgaacagttttaaaatcaaaatgaaattttttaagattcgcttatgtaagaacttcattttaatttcgtgacagtttctgatatttcaaataaaatcctcccttttcttacatagattatgcacagggaaaagggaggagtcaatctgattcagtgcttattgttttgtagcttttttaattgtttcgttagctttttcagtgaaggcttttaaagcatccgctggtttttgatcgccatttgaaactgattgcaacattgggaaccatagagttctcatttctgcaaaaccatcaattgtattgtagtatggtgagtagtatttagtccaaccactgattgtttccatacgtttatcttcataaagttttccaaatgaagtacgaactgggaaggcacctgtacgaacaacgtcttttggaccccattctttgtcatccgcgatgaattgaacgaatttcttagatgctgcaactttcttgtcgtctttgttgttgaatactgcaaatccgtttacaaggtattcaagagctggtttacctgaatctgatgggaatggtacttctaccacttctactttacttgcttccaagagtttagcttggataccgttttgagctggcgcccaaaggattgtgtaagatgtttgaccgttggcaaagttttggatatctgctccaccgtcaaattgtgaaccgttgttcaacaaaccgtctttgatccagctagctgctttttcaagacctttgacgaatttaggatcatcagttgtatattttgttacatctttatctgttacagaaccgccgtaaaggtttgagatgaaggcacgtgttccttggtctcccccttgaccagaactgaacaatgaacctggtgtgtagcctttgtctttaagcgctttcaaaactttctcaaagtcgtctgttgtccaaccttcttttacaaggttcgcaactccagcatcttccaacattttcttgttcatagccatgtagaatggtgctgaactgattggatacatgtaggctttgtctccagccttacttgcttttacaatgttttcattgttgacatctttaacaaagtcatctgtgaagaggtcattcaagtcagccaatttaccatttttaccatattggatgatacgtcctggtgcgtcaaaaagtacgtctggagctgttcctgcttcgatggctgttgtgattttttcaggacctgacttgaagtcgatggtttccaatttcacttttatatctgggtttgctttttcaaacgcttcgatgattgatttttcataagttccaacaccgtcaccagttttttcttgggtaaatactgggaatgcccaccaagtgatttctgttttggcaccgtcaccacctgatttggcagcatctttacttccgccagaattgccacaagcagcaagaccaagaaccgcagcacccgcaagtactgtacaagctaattttctaaatttcatctgtattctcctatgtaataagcgtatccatattggataatgagtaagattgtatttgtatgcgttttcatttcatccgatgcatccaccactctcctctgttttttattaagtcagtaagtacttatactcttcgaaaatctcttcaaaccatgccagcttcgccttggcgtactcaagtatagcctgcgcctagcttcccagtttgctctttgattttcattgagtattaatcatctacacctaaaatttcattaatactatttttatataagattgcttttgctccatatattgcttgaataccacccttcacttctaagacatcaactgcaccaatttgttttaaaagtgctttatcaacttgatgaacttcttttacagctacacgtaaacgtgtcacacaagcatctacatcttctatattatttgatccacccaacgctctgataatttgtaggctatcctgttttaaatgatctgcagtatttgaagttgaatctgtggattcagaaatttctttagaatctacttcttctcctcgtcctggcgttagaacgttgaattgagtaatgaaccatctaaaaacaatataatacagaacactccaaataagtccaaatggaatctgaagaacccaattcgttttagcgttcccctgcaaaattccaaataaagtaaaatcgattacacctcctgagaatgtgtttcctattgaaatatttaagacgtctgcaataaagaagctgacaccatcaaggaatgcgtgtacaacatatagaaccggactgacaaatagaaacataaattcaattggttctgtaataccggtaataaaagatgttaaagcaactccaaaaaacagacccgcgtattttttacgacgatttttaggaacactatggtacatcgctaaacaggcagccggtaaaccgaacatcattgttgagaaacgacctgcaaaaaaccttgttccttctgtaaataatccagaatgagtcgggtcggctaattgagcaaaaaatattttttgagctccaaccactgtttgtcctgcaacagtttcaacaccaccaagttcagtataccaaaacatagggtaaatcatatgatgtaagcctactgctccagaaagtctcattaaaaatccatatagaaaagttccaattggacccgcctgagaaatatatccacctgtagaaacaagaagttgttgaaaaggtggccaaataacaaagaagacaaagccaattaagatagaagagaacgatgtaacaataggaacgaagcgtgaacccccaaagaatcctaaagcggaaggtaattgaatattgttatatcgattgtgcaaatatacggcaactattccgacaactaatgctccaataactccagtatcaattgcagatccttctgccataaaaagttttaccagagctttaatcgttgcagtcataactaagtaaccagttactcctgctagcgcagcggttcctttatctcgtttcgctaagccaatacataatcccacacagagaagtagtgataaattactgaatacaacctctcctgcagagctcattacttggaatattgattgaaaaaaactattgtctagtattggataagttgctatcgtggttgggtttgaaagtgcaccaccaatccccaaaagtagacctgctgcaggaagtatagctataggtaacataaaagcttttccaactttttgtaaaactttaaacataaaattcccccttacatcttatttgagaccagcaacaaagcgttctgtaatctcttttggtctagtaatagcgccaccaacaacgatgcctcgcactccgtatccctggatttgtttggcttgttctggtgtatggattttcccttctgcaatgacatctacaccagcatcacagagttttttgattaattcaaaatcgggaccatccacttttggactgtaagatgtgtatccagataaagttgttccgacaaagtcaatccctgcttcaacggctgccaatccttcctcgaaagtacttgtatcagccatcaagagctgatgaggatatttctccttaacctgacgaatgaactcttgaatctccaaaccatcgtagcgttcacgcttggtacaatccagagcaattacctctatatcaagttctgccaattcatcaacttctttcatagtggcagtgataaaaggttcttgcggtggataatctcgtttaattatcccaatgattggaaggttggtaacctccttgatttccttgatatcgcgaacactatttgctcggataccgactgctccaccttgctcagccgctttgaccagcaagggaatgactcctcccgcttctgtataaagcggttcgtgaggaagggcctgacaagaaacgatgattccatctttgatttgtgcaatcaaggcttctttagtaatctgtggcatcctctttcctccttttctttgttcttatgagttcattatatattagttttaaagcgctttcaataccttgtggtagaatagatttcagtttcaaaagtattttatagaacagctgtttctgaaagtagtttcagagaaccatctatattaaaacatttttactgaactataaaaagagagctactgggctctctcattcatcattttacatacttaaaaggaatctcactaccacatagccagttgtagacttggtcattgacaaagacattcatgacttcgtgagcatactcaggcatgatgcgataggccttatcgcaggtcagccggttgtaaatcgcaaactgggtaataggatagcaaacatcatcgtccaagcccgtaatcatcttaacctcacccttgatacgatgggcaagatttttcacatcgatataggcaagggtcgctatgatttcctcctcagtttcgtggaagggatcgtgaaacttgaaataacggaacagttcgtcgtaagcctcgctagtattaccaatctcaagcactcgtctaaagtctgacaagaagggataaatggcaactgttttatgaatccgaggattgagtgctgctgcaactagagctagagcacctccttgtgaggcaccatagctagaaagacgcttctcatcaacctgagacagactggcaacaatttcaaccaactggtaaatatccagataaacatccttataaaagaggtgatcccgaccttccacagccccacggatgatatgccccttgaccgtatttcctagaggagaacgcaagctgtcttgtgagtaacccgactgcccccgcacatccatggaaacaacaccgtaaccagctacggtgaaggccagcatgtcagcccagtcccagccacgtcccatataaccatgaaaatggaagattatcggaaccttctcgtcactcttcggaagaacgacgcgtgcatagaccttgccttcattggttccttcaaaggttaattcatagcactttacttgaggaatgtggaaattcctttcctccaactgataagctggaagattggaaacttttttcacttcctcatcccaaaaagcatcaaagtcttgtggaacctcgtcccttcctagataggtcttaatttcttctaataaagctggatttttcatagcatgctccttttttgtaatcgctaccaccactctagcatatctagaaaagcaatgcaagaaagaagggtaaatagaaagagattttagattctttacttttaggatgatgggctgaaagtagttttagaaacgaaaaaagagcatttcgctctttcttccttctatttatattattttgttgcttctttcttctggaaagtggtttggtaatttactttaatcgttactgtcatatgagagtcctcgtttctttttgatgactctagtataaagggcaaacctgaaagctagcttaatactcttcgaaaatcaaattcaaaccacgtcagcgtcgccttaccgtactcaagtacagcttgcggctagcttcctagtttgctctttgattttcattgagtataagatttccttagagaaagcttaatctagatgttctttcttttccaaatgaagggcaatcatgcgccattccggatcctcttgccagccttctattgaactaatgtagctagcaacttttctggcttcttctaaaattgggaaatcttcgataatatcagccacttggaattctggaagacctgactgtctagttccaaaaatctcacctgaaccacgcattttcaaatcttcctcagcaagaacaaaaccattggtggtttctgtcatgatgcgcatacggtctttcccagaatccgtcttgggattggcaacaagaactgcataggactgcttatctccccgaccaacacgacctctgagctggtgaagctggctgagcccgaagcgatcggcatccatgataatcatgacggtcgcatttggaacattaaccccgacctcgataaccgttgtcgaaactagaatatccgttttttgctctttgaactcctgcataatctgatctttttcgtcactcttcatcttaccatgtagaagagccacttctgccttacctgcaaaatgagccgtcaactcctcagataaggcaatggcatttttcaaatccagagcttctgattcttcaatcaagggagagataacataggcttgagaacctttttggatttctccctctaaccaagtcaagacctgaggtagttgctcatgtttgatccagcgcgtcacaataggcttcctccctgctggcatctggtcgataatggaaacatccatatcgccaaaggctgtgatagccagcgtccgtggaataggagttgccgtcatcatgagaacgtcaggattgtcccctttttcccgtaaaatacgcctttgccccacaccaaaacggtgctgctcatcgatgataatcaagccaagacgagcataatccactccatcttgtatcaaagcatgagttccgataataaagtcggcctcacccttggcaatggtctccaagacttctcttttttctgcagcttttaaggaacctgttaagagagccagtttcaagtctgggaagagactcttcaaactctcaaagtgttgctctgctaagatttctgttggcaccatgagggctgattggtagccagctgtcaccgccgcaaacatggccaaaccagcgactactgttttcccactccccacatccccttgtaggagacgattcatgtggtggtcggacttcatatcagttaaaatttcctgcaaactcttttcctgagcttgggtcagggcaaatggcagactttctttaacagctgacactttttcctgagaccagtccagaaccagaccgcttccctgaactctattttcagatttgagcgtttgcaattgcatttggaaataaaagagttcctcaaacttgatacggcgaagggcctgcttgtattctcccaaatcctttggaaaatgcatagctcggactgcctgacaacgggacatgagtttgtatttgtccagcaaggactggggcagattttcctctatcaagaggtccaggccctgatcaaaggccgttttgatgaccttgaccagactggcttgactgattccctgagtcagacgatagacaggctggaggtcatcttccacctgagccaggaccttcatcccagtcagactagccttggcacggtcccattttccaaagacggcaagagttgctcccaactctatcttatcagccagatagggctggttaaagaaattcaccgcaaaaacaacttctccctgcttgagactaaaacgcagtcgattgcgcttgaaaccataatactgaacactagcaggagtcacgacttgaccagacaaaaccgccttttctccgtcttccagctccagcacctgcttggttttaaagtcttcgtaacggaaaggaaagtagagcaagaggtcttgcaagttttcaattcctagtttggcgtatttttctgctgactttggtcccacaccaggtaagacatgcaagggttgatgtagattcatgctccactcctttcttttctaataatattctctcggaatgcggtcgctgagaagacaaaccacctcatagttaatagtcccacggtaggtcgctacctgagtagctgtaatttccttgtccccgttagaaccaatcaaggttacctttgttcctaagggataaagcttaggcagacgaatggtgatttggtccatcgaaacccgcccaacgattgggcaagcttgcccatctaccaagacagcgaaattttgcatatctcgtgtccaaccatccgcatagccgattggcaccgtcgctatgacttgctcgctatccgcctgataggtcgctccatagcccatgcaagctccagctgaaactgtcttgacatgaaccagagcagattccaaggtcaaggctggtttcaagtcataaggtaagtccaaaacctctccgctaggattaagaccatacatggcatcccccatacggaccgcattgaaaatagtctctgcatgccaaagagtcgttgccgaattgctggcatgtatcagctctggaagacctttcataccggctaaaatagttttaaaccgttctaactgggtattaaagtagtcatctgatttctcgtctgcagtagcaaagtgggtaaaaatcccttcaacacgagcaccatgttgttggagcaagtcttgagcctgctcagcctcatgagcctctcgaaaaccaatccgtcccattcctgaatcaatcttgaggtggactgttaatccagttaagtccgcttccttatctaagagtgcttgaatccactccagtccagctacagtcaaggtgatgtcatattctttagctagagcaacaacttcgatttcagaaactcctaaaataaggattcgcttgctgagtccagcctgtctgagttcaatagcttcatcgatattggaaacgcaaaagccatcaacatcatcttgaatagtcgtggcaacggcaacagctccatgaccataggcattagccttgactactgcaaatttgagtgttccttcagggatatgagcccccatttgctgaatattttgtcgaatagctcccagatgaatcagagccttggttggtctatgcggactagctttcatgattttcctccaaaatgacactggctgtcacaaactgatctgtatggctgatagacagccaaatctttcctgaaaatggtgactgactaaaataaggcgccccgcgttcattattcaagacttctaaatcttgaaaaccgagcttgccaataccagttcccatagccttggaaaaggcctccttagccgaccagcgaccagccaaatattcaatctgcctgcgccctttgagactggtgaagcgctccatttccttagcggtcagcacgcgcttagcaaagccttcatgtcgtgtaactgcgctttctatcgaagccaattcttcgatgtcaattccgtgtccaactatcattctcatcaaaaggagttgagatcccccaactccatccttttcacttattttgtcaaggtagcataaatctcttctaccaaggcctctgtattttcccaacctagacaaggatcggtaatggagcaaccaaagacctctggttggttttgacgaccatctgctaggtaagattcaatcataaagcctcgaactatctttttaatcttctcattccagtcacgattttgcaaggtctggcgaacaattcgaatctgctccatatattgcttgcctgaattatcatggttggtatcaatgagaataaagggattttcaagtcccatggcttcatagcgttcaatggcatttagcaaggtttcatagtaaaagttaggctcatttttcccatattcattaactgcaccacgaaggatgacgtgagccaagggatttcctgaagtctcaacttcttgaccatggaagaggaaggtttgtttgttttgggcggcatagataccgttaaacataacaccaagattcccagaggttggatttttcatcccgactggtgcatcaatccctgaagccacaaaacggtgctcttggtcttccacagaacgagcccccacagcatggtagctgaccaaatcatctaccaagaccaaatttgacggataaagcatctcgtctgccgttgtcaaacctgtctctgtaatgacgcgatagtgcaactggcgcacagcctgcaaaccgttaatcaggcttggagccttagaggtatctggttggtgaaccagacctttatagccgtctccgttggtgcgaggtttagctgtataaacacgcataaccatgaaaatcttgtccgccaccttcttctgcaaggcggataaacggcgggcatattccaagacagcctcttcattatcagaagagcaaggaccaatcaccaaaaggatccggtcatcttctcctgaaatgatgtctgccatttctctatcacgacgctcctttagtcgcaaggcttccgcagacaattgggtttctgctttgattgcttcaatatcaatttcttgacctttttcaataaatgccatcttattctcctagcgtttggtagatttctctgacgagggcttccgtattatcccagccaagacaagggtctgtgatagacttgccaaatacttccggttcgttttgacggccgtcttctagataagactcaatcataaagccacgaacgtactgcttgattttttcattccaatcacggttaatcaaggtctggcggacaattcgaatctggtccatatattgcttaccagagttgtcatgattggtatccacaatgataaagggattttccaagcccatcttctcatactgagcaatggtatccatcaaattatcatagtagtagttaggaatattcttaccatactcattgatcgctccacgaagaatggcatgcgaaagcgggttcccagttgtttccacttcttttcctaggaaaaggaaactttgtttgttttgagcagcataaatcccattaaacataacattgagatttccagaggttggatttttaaacccagtcgcaaaatctgccccacttgccacaaagcggtgttgctggtcttcaactgaacgggcaccaaccgccatgtaagaaatcaaatcatctacaagcggaagattttcaggataaagcatttcatcagctgtcgtcatacctgtttccgtgatgacacgatagtgaagatggcgcacggctttgattccgttgataagactaggcgcttctgtcgcattaggctggtgaatcaagcccttatagccatctccgttggtacggggtttggcagtataaacacgcataaccataaagatacggtctgctacttcttcttgcaaagctgccaaacgcttagcgtactcaagaacagcttcttcattgtcagatgagcatggcccgattaccaagagaatccgttggtcttctccacgtataatggcttctagctcttgatcacgctgtgattttctctctaaagcttgaccttctaattttgataaggcacgaacttcttcaatattaattttaggactttttgctgtaaataccataactcatctccttataaagcaaacggataccaagtaaaaatttacttttcacaaggtatccgcctctaaactatctcattttattgtcttttaccgtgacagtttttaaacttcttaccagaaccacatgggcaaagttcattccgtccaatctgactcaaatccaaatcttctggtatatttgcttggtgggcagcgatattgcgggtcgctgttgtactgatatggtgttctgcttgtggtctttcttgttcatgaatttgggctttcatcatcaaacgtgtcacatcaaactcaatcgaaccaatcatatcattaaacatacggaaaccttctgcctgatactcaacaacagggttgttctgagcataaccacgaagtccaaccgcattacgcaattgatcgagggcatcgatatgatctgtccacttgttatctaccactcgtagaatcaagactttttggaattctttaactgcttcttcatcacgtagttttgaaacctgactatcataaacttgcaaggcacgttggaagagttcttccttaatagccttatcagacaagcctgacaagtcttcgattgcaatcgaatcttcaggaagcaagttgtacttagcaaagttcaaaattgcttctagtttttcatcttgtttcgcacgcgcatgaccatcaacgacacgaccaattgtacgtttgatcatagcctgaatttcgggtgccaagtcacggtctgcagtgatgacatcgtaacgttgagcgtagataatctcacgttgttcacgcatgacatcgtcgtattgaaggacttgtttacgagtatcgtagttatttccttcgacacgtttttgtgctgcttcaacctgacgcgtcaacatacgagactcaatggcctcttcagacatattcaagcgttcaaagattcccttcaagcgttcagaaccaaaacgtttcatcaaatcatcttcaagagataggtagaattgtgactcacctgggtctccttgacgacctgaacgtccacgaagctggttatcgatacgacggctttcatgacgttctgtaccaataacacaaagtccacccaattcgcgaaccccttcaccaagcttgatgtcggtaccacgaccggccatgttagtcgcaatggtaacagcaccacgttgaccagcattcatgatgatttgggcttctttatagtggtttttggcattcaagacctcgtgaggaacgccagctgcgactaatttcttagaaatatagtcactggtttcaaccgctactgtaccaaccaagactggttgacctttttggtaacgagccttaacatcttcgacaaccgccttaaacttagcctcgatacttgcataaagaaggtctgagtggtcaatacgttgaacaggacggttggttgggattggaataacacgaatgttgtaaatttcacggaattcttcttcctcagtcttacctgtacccgtcataccagacaatttcttgtacatacggaaaaggttttggtaagtgattgaggcagatgtcttggtttcatcctgaattggcacaccttctttggcttcaatagcttggtgcaatccatcagaataacgacgaccttccatagtacgacccgtaaattggtcaacgatcaagatttcttgttcttcgctcaccacatagtcaatatcgagaagcataatgtagttggcacgaagggcgttatcgataaagtgagtcagagctacgttttcgatgtcatagagattgtcaagcttgaagtagctttcagccttgtcaatccctgaatcagacaaaccaatagtcttagactgcacatcgatgatgtagtcgtctttgtccaaagattttacatagtggtctgccatgtggtagagctgactggtttcaactgcattagcacctgatacgatcaaaggtgtacgggcctcgtcaatcaagatagagtcaacctcatcgaccaaggcatagttaagcggacgttgtaccatgttttcagcacgaacaaccatgttgtcacgaaggtagtcaaatccgatttctgagttggttgagtaagtaatatcacactcataggcttcttttttctccattggagatttggcagccaagttaatccctactgacaagccaagccaagaatacaattcacccatctcagtcgcatcacgttctgacaggtattcgttaaccgtaactacgtgaacccctttacctgaaagagcattgaggtataccggcatggtcgcagtcaatgtttttccttcccctgtacgcatctctggcacgtcaccatggtgaagaacgattccccccattacctgaaccttatatgggaagagacctaggacacgtttggcaccctcacggacaaccgcaaatgcttcataaagcaatgaatccagtgattctccattttgataacgttctttaaattcaactgtttttgcttttagttggtcatctgtcaaagcagccatttggtcttcgtatttgaaaaccttgtcagccatcttttccagacgacggatttctcctttatcattttcgataattgtttttaaaatattagccatgtttttccttactttaaattccgaatattttagaatgttcttttaattttagcacaattactgattattttcaaggaagaatccccattttgaaaaggaaaaagaggctagtttccaagctaacctctctgacttttatgatactttaattgccaaaaatcggcaaaatcgcaaataggataaatagattaatccaaagagaaaaacagcagatcaatccaaaaacaaagagactgactttcttggacagcaaggccatcaaaatagacagaataccaaaaactagcaagactttctgtatgctgaagaggtcaatctttccccccagaatcggactgccccaaggaagaaagaagaaagcaatccagatcaacagaactaaaccaatatagaccttagaatagcgtgtaataaatgattttagacgtgtcataagctacctcctatcaataaaaaccatataaatcaatgcctttcgcctttagattgtcctagttcccgtctcaagcaaaacatgtttttgaaaaagatatagtctaaccagtcactgcctagagataagactatcaaaagcaaccaaacaccccaagtactagcatctgatacataatttagaacaaaagggaaaaataagaatgaaaaaattgtcatatccaagctaaacagagctaaaagggaaatataaatccagtagaaatagtagataatggggaaaaacttactgtttctatcagcattatctatccaaataaaaaaagtaaaagcagggaaataagagtatcaaatgaaaccaattaaacgacagtttcatcatcgacacctcctctttaaaattgttttctttagtttcattctattaaatgttcttaccaatataaatcaatgctttccacctttagacttccccagttcccgtctcaagcgaagcatttttttgaaaaagatataggttaaccaagaactggaaaaagcaataagtagtaataatagccaaatgccccaagacttgatgtctgccacatttctcaataggatattgaaaaacaagactgaaaaaactgtccaagcaaggctaaaaagagcatagagggtgatgtaaatccagtaaaaatagtaaaaaattgggaaaaatttactatctctgttggccttttcaatccagctgaaaaagtaaaaacagggtaataagattaacaatttaaacaaatgttccatcatcaacacctctttttgatagcgctttcttcaacttcattttatcaaaaaaatctggaaatgtcattccagattctgcttttttatttacgttttcttgcgatgagatgaatcggtgttccttcaaagacaaaggccttgcggatttgattttccaagaaacgcaggtaagaaaagtgcataagttcttcttcgttgacaaagataacaaaggtcggtggtttggttgccacttgggtagcatagaaaatcttgagacgtttccctttgtctgtcggtgttgggttaatggcaatagcatccataatcacatcgttcaagacggctgatggaatacgtgtattttgactttcgctgatttgcttgatcatctcaggaagtttgtggagacgttgcttggtcaaagctgatacaaagataatcggtgcgtaaggtagatattggaactgctcacggatatcttcttcccagtttttcatagtgtggttgtctttttcaagtgtatcccacttgttgaccacgataatcatccctttaccagcttcatgggcaaatcctgcaatacgcttatcgtattcacgaataccttcttccgcattgatgaccatcaagaccacatctgaacggtcaatagcacgcatggcacgcatgactgagtatttctcagtattttcataaaccttaccagatttacgcataccagccgtatcaatcatggtaaactcttgaccatctgtatctgtaaagtgggtatcaatagcgtcacgcgttgttccagcaacaggactagcaatgacacggtcttctcccaaaatagcgttaatcaagcttgattttccgacgttaggacgaccaatcaaactaaacttaatgacatctggattttcttcctcatattcatttggaagattttctacgattgcgtctagcacatcccctgtaccgataccatggacagatgagattggcagtggttcacccaaaccgagggcataaaaatcatagatatcatttcgcatctcagggttgtccaccttgttaactgcgaggataactggtttatgagttttataaagcttacgagctacgtattcgtccgcatcggtaattccttccttaccagacacgacaaagacgataacatcggcttcttccatggcaatttctgcctggtgcttaatttgttccatgaaaggagcatcgacgtcatcgattcctcctgtatcaatcatgctaaaagaacgattgagccactcacccgtcgcatagatacggtcacgtgtcactccttcgacatcttccacaatggagattcgctcaccagcgatccgattaaatagggttgatttcccaacattgggacgtcctacaatggcaatagttggtagggccataatttctcactttctacaataacttcttctgttcaagattttttctagttgagcttggttcagctcgaccaaactgttctgctagacgttgactccagcttgtggtcgcacgcgccccagcatagtctgtctgcacacggtcataatctttgatgatttcaacagattgctcctggtattcttcctcaaataccacttgattcaatggcaagcgaggtttgacttcatgttcttcatttgatattcctagtgccatcccaaagacaggataggtgtagtcaggcaaattaaagagttctgctacttcttctgacttgtaccgcaccaagccaatgatgacacctccatagcccaaactttcagctgccagcagggcattttgaccagcaagggccgcatcgaccgaactaatcaagagaccttccacaccttggggttggaatgtatcggtatggagtcgtgctcccttttctgcacggttcaaatctccgataaagagaaggaaaacagctgactggcgaatggcttcttgaggcaccaattcatacaaggcatctttcttctcttgacttcgtaccacaatcacagagtaggattggaaattcttccaagacgaggccatttgggctgctgtcaggatttcagtcaagtcttcctgagggagggcttgctctttaaatcttcgaacagacttatgagctttcatcagtttaatcgtttctgtcatcgacggtttactccttctaaacgagtctcctcagccaaataacggatgcgttccatgacgcgtctggcttcccaggtttcgtcatttccatgtttccctttagcgaaatgctgctccaattcttcaaagttgaagttggaggtgaaaaaggtcggtaaattttcctgcatccgatattgaagaatgacctgcaggatttcatcacgtacccaagctgttgattgctcggcaccaatatcatctaaaatcaggacttcagaaagcttaatctcatccaccaaggtcttgacattgccatcaccgatagcatttttgacatcaatgacaaagctaggatagtggagcagagtggatgaaacaccgcgtttttctgataaatcatgggctaaggcagccaccatgaaacttttacccacaccaaagtctccatataagtaaagaccttttcgaatagctggatattgctccacgaaggctaatagcttttcaaaaactggcaagcgctccaaatcatccaagtcaacttgagccaaactagctttcctgagactggctggcagattgattaacttgagacggttcttaatagccgcttctttttcggccgcgattagttcaggagtttcctcataagaaacgtccgcataaccatgattcataaccaaaataggcttatagcctttggcaatataatccgtatcaccacgaagaaacttatcacgctcggtgatgtactgattaaacttggagatactgcgattcaattcctctgggctgagggattcttgctggataaaggccgcaacatcaggatccttcatgattttctggaccaaatcttgataatgaaaacggctaggttgacgtttgagtacgtctccgacactttccatctaatctcctcctttttctaatcgagctaatagttcttgtttcttacgttctagttccagacgagtttcctcgctggtttcattcttataatctggattgctccacttgggtacattggacttggtaggactcggtttactgcttttttgagcctgattcttctgtcctcgctcacggatgcgtaagaccgcctcttctgccgaatgtatcttttgataggcatagtcattggccactttcatggcatatttctcattgatatttgccgaatcgaccttattaaaggtcaataagagaatgatattgatgacttcgtccagcaaacccaagccagccatctgttgcaagaggtctctttctgtttgggtaatggtccccttgcgtgtttgcttgatttctgccaagaactgcagggcagttttacttttagcctctttgataatggtcgtttccttaggactaaagtcagaggaaacaggtttttgagcaattttttcccgcatacgcttggttgaaataacctgggaaacagctgttgacttagccagttgataggtttcaaaccaagtccatttcttctcctcagcgatggcaaagaggttcaagacatcggactgctcatctgcaaaacgaagtccatctcgagccataagctggcgaaaatggtccaagtcaaaatcgttggccactttcttcttgagaccaaggtcttcttgacttccctgttctgccaagtctggaaagacttgattgagtgagacaggtatttcttcaccatcagcactttcaactttcaaatcctccacagccgagtcgccaatctttttctctaaaagtctacgataaacaggatgctccaagaaatcttgacttgaaagaggagcatggataactatctgataggtatcacccttttgatagagggtcaagagattaaaagcagataggattttcaaagattttaaaagtctgtccatcccaaaattgagatgattgagaatgcttgaaaaaaggtattcctttctgccattatcccaaaaactaatcgtataaagataaaggctcagtgcctcctgaccgataatcgggaggtagcactgtaccagagatgaggtatcttgcgacacccgattattctttagataagaaaaacggtcaattggcttcatttatctttcctttttctttttagaggactgggtgatttgttggagcaggctctctaactcactaacatccttaaaactacgatagacactggcaaaacgtacataggtaatctcgtctaactcagccaactcctccatgacgagtgaaccaatgtcctcactttgaatttcattttcatttcgaccacggagtttctgttcgatacgattgactaccatgttgatttcatcacttgacacaggacgtttctgggctgagcggataattccattaaagattttatctctagagaattgttcccgtgtgccatcttttttaacaaccactaaggttctttcttctactcgttcgtaggttgtaaaacggtgctggcattcatcgcactcacgtcttctacgaatagtgttcccttcttctgcttggcgactatcgataacacttgacttggtagccccacattttggacaacgcatcctttccctccttatcgttttcttttcattataccattttttaaacgattcccaaaacaattcttctttttgcttgacaagttttttgttttgttgtattatttaattaagacaaaaggataaaagaaaggagaccaagatgtcctggacatttgacaacaaaaaacccatctatttacagattatggagaaaatcaagcttcagattgtttcccatacactggaacccaatcaacaacttccaaccgtgagagagctagcaagcgaggccggtgtcaatccaaacaccatccaaagagccttgtcagaccttgaacgagaaggatttgtctacagcaagcgcacaactggacgatttgtgactgaggataaggagctaatcgcccaatcgcgcaaacaattatcggaagaagaattggaacacttcgtttcctccatgacccattttggctatgaaaaagaagaactaccaggcgtagtcggcgattatattaaaggagtttaagcctatgtcattactagtatttgaaaatgtatccaaatcttatggagcaacaccagcccttgaaaatgtttctcttgacatcccagctggaaaaattgttggtctccttggaccaaatggctcagggaaaacaaccctgattaaactaatcaatggcctcttacaaccagatcaaggacgtgtccttatcaacgatatggacccaagcccagcaaccaaggctatcgtagcttatttgccagatacaacctatctcaatgagcaaatgaaggtcaaagaagccctaacctacttcaagaccttctataaagatttcaatctggaacgcgcccatcatctacttgcagacctcggcattgatgaaaatagtcgtctcaagaaattatcaaaaggaaacaaggaaaaggtacaactgattttggttatgagtcgtgatgctcgtctctacgttttagacgaacccattggtggagtggacccagcagcccgtgagtatatcctcaataccattatcaacaactactccccaacttctaccgttttgatttctacccacttaatttctgatatcgagccaatcttagatgaaattgtcttccttaaggacggaaaagtcgtccgtcaaggcaatgtagatgacattcgctatgagtcaggtgaatccattgaccaactcttccgtcaggaatttaaggcctaagtaaaggagattattatgttttggaatttagttcgctacgaatttaaaaatgttaacaagtggtatttagctctttatggcgctgttctcttcctctctgttcttattggaattcagacacaatccttaatcaaactacctgaaaaaaatctatctgttctacttttttttctatctactgtctttggtggtttgatggttacacttgtgatttcaactatcttcttgattattaaacgattcaaaggaagtgtctatgaccgacaaggctatctgactttaaccttgccagtttctgaacaccatatcatcacagccaaactaatcggtgcctttatctggtcgttgattagcactgctgtcttactcctatgtatctatattatcttattgtcaacaaattctgatgcagttcaactttctactcttctgtcatttgttgcagaacattttaccggctttagtcttactgtcttatccttcctactaaataccatttctggaatcctctgcatctacttggctatttccattggacagcttttcaacgaataccgtaccgcactcgctgttgtagcctacattgggatccaaatcgtcataggatttattggagttttcttcaataccagtactaacttctatgtcaattcacttgcaggatttaatgataatttctatatgggagcaagtacgggcatttttgaagaactcatattcatagctattttttacctcggaacctactatattttgaaaaacaaggttaatttgcaatagtttttaaataatttttacctagatatataacatactcataggacaaaaagtctttaaaatcagaaaacgcataatatcaagtgttaaaaatccttgatattatgcgttttattgttagaaaatttgctttattttctcctctaattgagtttttgcccagcctcaaaacaccaacttcattttacctaccaagcacagtcattcgtcatttattttttccaatattatctacgaactttgataaaaagagaggtaccatagctataaaaacttgccctctttctccccatgcaaataaaacgactgcaagaacagctgaaaagattgctaaacatatagatattagacgacatattttcttattattcatagcactgctcctttacttcataaatattttacaatagattttagttgaaagtataaaagaaaccccaatcatgatactggccaaaattatgatacttataactagaaggaaatgattagctgaactaatccagttaatgaaaatcatgccgaaagtcgttttctgaagaccatacactaatcccataactaacgatagtaccagtatattgacaatcgtatttccaaaagcaccaaaggcatatacggaaggaagcaataaggctacatacatgattccaaagattattccaatcaatgccataattaaatgtagattgagactgtattgattaaacatgacatgggtagcaagacttaaactcaatactatagaacttaccaaaagaataaaagaaatacaagagagatacctcgctaaaattatcttagattttgaaattggaaaaactcctacaaattgattccaaccattctcactatctgatacaactaaagctgtgggaagagaagctaaacttattggtaacactattagtaaaaaaattgtccccgattctcttgcaaagattgtaattaagaataaggctaaggcaataaatattctattaattatctttactttatttaaaataagttgcgcatctttatatagtagtcctttcatttattcgttctcctttgactaaaaataataaaatttcccaaagcgttgcataattactctcgtccttactcttgtcagatacaactactaaatatcgaacactatcaccctcttctaatttataataaatgtctacttgatccatattgttctttatttctgttttaatcataaatcggttcagtaaattttctctgtctccctctagaagaatctccccattatggataaaaataaaataatctgccgcctgttctaagtcactcaaaatatgtgaagataagattacggtcatattctcttttttaacatactcttctaaaatagataagatctctcgcctaacaataggatccaagccacttgtggcctcatctgcaattaatagtctcgggcgatgagcgagtgcagacgcaaaattaagtttcaccaccattcctctggaaaattctttcatctgtttttgagatggtaagttaaacttttgaataaaagtgtaaaataactttttatcccaactaggataaatcatgctcatcattctttcaacttgctccaccgaaaatgaaactggaaaaaagttttgctctaagacaacccctagtttcgatttaatatcttgctcatgctctgaataagtttgttcaaaaacccttatactatccttctcaatctgtagttgatttaaaatcagattcagtaaagtagatttaccagctccgttttcaccaatcagtccaataaccttaccttctggaatctctaagttacggacttgcaattgaaaatccccatactgcttggttaaattttttatattaactattgatctggctctcatgttaacacctcatctaaattataacatcatgtataaaatcgttaagctattccctaaaaaaataagactcgccaataaaatattaactttatttggcacattaagtttttttaattccagtaacaacagcaaagaaactagaacatagttaataacactaataaatataaaatactggtcagttattttcgttcctaatcgtattctaggtattagacacgtctggcattactaaaatttcttaactgcaaaaaaacatgaaagtcttaattattaggataaacttactaatctgccttcccaacatcaagacaattggacttcttttgtgattgcactcgaatctccaattgtttattcttctgaataaactgttggtaaggaattgtattactaaacgtaaaaacacctagtaatgctaatatagctaattttttaattccgcgtttttttctcttgcactgaaacccctttctgtttccttatttttattctaacatatatattttaattagccaattgtttttattgtattttgaacttttttttcttattattaccataaagaattttttattcctttaacttgctattttgaactaaaaattttataatgaaattaagcaaataggaaggattattatcttttatgaatacactcgctgagaaattcagagtaaagagaaaagagttaggtctctcccaacaaactcttgcagaaggaatttgtgaacaaagccagattagtaaaattgagagagggcatttcattccctccgcagaccttttgttcaaactctcacaacgacttgaagtaccattagattatttttttaatgaacaaattgaaattaaatctaacctctctaatttcaagcaattatctgctcgactattagatgacagaaattatgacgatttggaatatatttatagaatagagattgagcgaagcacctttctaacactagaagaccgaacttaccttgaatggattaaagctattattgacttctatcaatatgacagtaagtgtgaggcaatttcttcattggaaaatatattattaaaagtctcttcaaatactctgatttatttaaaggcgttgaatactctatctaatttctattccttagtgggtcgtgaacaagaatatgaggcaaactactctcatttgatggagttatatcagacaaaaaattttgagcatcaggagtttttatttggttacatcagagttcgttacaactacgctcactacctagtatcaaaggaaaaatataacgaagccatccaagaagctcttgagacgattgaactctgtaaacaaagacagacaagctaccaactggctcctctacttattcttgtaggaaatgctggagccaaatttctagacaaagaacaagtcaaaaattattatatagaagcaagagagttatgtaagatttataacaatcctttaatgttgatgaagatagaaaattatttgaaggaattagatactgtttaatttatcctatcattagaattcttcttaaactttgaataacccctaaagctaataaccagcttgattcaaattcacttcataaattagtggtattttgaggttttattttatcaagtatgttggcaaatttctctaatcttctaacttcattatagaactttaggtatcaaaagaggctgggacaaaagtctaaccttaaatataaaaagcgaacaaaacgagttatctgaaacttagaattctgttttgttcgcttttttatctaatctatcgattttaaaattttataataaagaattcctaaaatcaaaatctttttgtcccagcctctttttaactcaatatcaaactggctacaatggggctgacaaagacatagagaataccggtgacaccgatagccaagccacccatggctcctgctacagaaccatatcgaaaggctgtccctgttccgactgcatggcctgttcctccaagggaaagaccaacagctactgggtcgtcaattttcaaccacttcaaaagggttgggccgatgacactggttaaaatcccagttgccactacaaccaccaaggtcacggtcgtcagaccttgcaatttttctgtgattcccactgccatggcggttgttactgacttgggaaagagagaaatggctaggaaaaaatccatgccaaagattttggccacaagggctgtgaaagaggtattgacaactactgctagcagactaccaaagagaatactccgagcatggtgcttcatcaagtgaaaactcttataaaggggaatccctagagcaacagtcgatgggacaatcaagttgttcagataaaccccaccttggtagtaatcttggtaagaaatacccgtcacctttagaaagatgataatgaaaatagctgacaaaagcaagggcgttgtcaaaggatggggaaaacgtctgtaaatcagcattcctactagataagctaggatagacagggcaagcccaaacaggggattggaaacaaattcactcatttggcatctcctttctcataatctccctcaaaccgtctcttgatgaactgaactaccaaggctatgaggataatattgatgacagccgcaaaaaagacaatcaaaacaatgggcaagagatagggagcaatcacatcaaacttctccatgattcccactgctggtggcaaaaagagaatggtcatattggccagcaagaaattccccaccatattgacatgtctggttctcagccacttgaattgtagggctagaaagagaataatcaagccgataatactgcctgggataggcaaatgaaagaaactggaaattccctctccgattagagaaatcacaaagagaatcattaattgaacatataatttcatcctaaactccacgaaatagacttcttgcataccagtttactcttttttcagaaaatttcaaggaaatacacaagggataatgaaaattagaaatggaaaggggatacaaacaattcttgacttgtgaaaactggtatgatttaggataaaagatttcagcgtccttcttgtcagcattcttgaaaagtagtataattattgcatgcgcaatcatcttgtgatacagagactgtccgtgaatggactttcttctatttacaactctaaaaagaaaggagatactatgacctatttggaaaaatggtttgacttcaatcggcgtcagaaagaaattgaaagtctcttggaagagactattgcccagcagagcgagcaaagtctgaccttgaaagagttctacctgctctactatctggacttggctcaagaaaaatctctacgccagattgacctgccagataagcttcatctgagcccgagcgctgtttctcggatggtggctcgcttggaagccaaaaattgcggtctgcttagtcgcaggtgttgtgatcaagataggcgctctagctttatctgcctgacaagtgatgggcaaaagacactggccactctacaaaaggctgtcgaagaaagcttggaaactggtttagatttcttgatttaagatgattttgaaaaaaagttgcgtgcgcaatcatttttcttgacattctcttttacaaggagtaaaataaaatcatcattaaacaaaggagttctaaacatgattgaaattacctatctagatgccagcaagaacgaaagaactgtaactttcgaatcttatgacgactttgatcgttcgcaacaagcttgccttatcggcgtcgcagactactaccctgtccaaaaattaacctacaacggtcatgatttggactaccatgggacttatggagatgtcttcttctatctcatgaaacaagatttaagccaatataactaaaaaaggagaaatacaatggcaaaagcaattacagatgcaacattcgaacaagaaacaaaagacggtttggtcttagtagacttctgggcaacttggtgtggtccatgtcgtatgcaaggcccaatcttggataaattgtctgaagaactttcagaagatgttttgaaaatcgttaaaatggacgttgatgaaaatccaaacacagctcgtgcttttggaatcatgtctatcccaactcttctcttcaaaaaagacggccaagtggtgaaacaagttgctggtgttcacacagcagaacaaatcaaggccatcgttgctgaattgagctaatcaaacgagagaccaagtacttgctttggtctcttttttcttgccctttgccatttttcaaaaaatatgctagactgttagtagaatattacgatgtttgggacatgccatcgctaaaaaaaacctctacttggtattttttagctccctcaagggagctttttgcgtgctctgaacattccccattttggaaggagtactatgaaacgtcaatcagccttggtcgtctttagtggcggtcaagattctacaacctgcctcttttgggctaaaaaacactatgaaacagtcgaagcagttacctttgcctacggccaacgtcatcatctcgaaattcaagttgctagagaaatcgccaaggaacaggggattcgtcatcacatcctagatatgtctctgctggggcaaatcactgaaaatgccctgacctctgatatggagattgagcaaaaagagggagaggttcccaataccttcgttgacggtcgcaaccacctctttctatcctttgcggcagtccttgctaagcaacgaggtattaaagatatcgtgacaggtgtctgcgagacagacttctcaggctaccccgattgtcgggatgtcttcgtcaaatctcttaatgttaccctcaaccttgctatggattacgactttgttatccaaacacctctcatgtggctagacaaggctgaaacttgggaattagccgaccaactcggtgcctttgactatgttcgtgaaaagaccttaacctgctacaacgggattatcggaagtggctgtggagattgtcccgcctgccacctacgtcaacatgggttagatgtttatctctcacagaaaggagaggactaatgttttttgcacccaaagaaatcaaacaggaaactggggagtcgcttgtctacaatcctcacagaaccttggtatcaaaagaatttacctttgatgctgcccaccacctctttcactatgaaggaaaatgcaagtccctgcacggccacacctatcatctgcagattgctgtcagtggatttttagatgaacgtggtatgacctacgattttggagacatcaaagcgatctacaagaactacttagagccccacttggatcatcgctatctcaatgaaaccctgccttatatgaacacgactgctgaaaatatggtttactggattttccaaaccatgaatcaagagttgcccgacaaacgcggtcttcgtttggaatacgttcgcctctatgaaactccgacttcctttgcagagtttagacgggagtggttagatgactagggaacgtgtcctcaaactaccagttctggaaatttttggccctacctttcaaggtgaaggccgtgctattgggcagaaaacaatgtttgtccgcactgctggttgcgactaccactgcgactggtgcgactctgcctttacttgggatggttctgaaaaaccaactcgcatgacagctgacgaagtcattgctgccttggataaactagggaactacgactatgtaaccctgtctggcggaaatcccgctatcctagcagccaacatggctgaactggtcactaagctcaaggaacgtggtgtcacccttgctgttgagacccaaggctctcgctggcaaaattggttaaaagatatcgaccaggtcaccctgagtcccaaacctccttcatctaagatggaagtcaactttgagaccttggactttatcgtttcccaactagatccagacaaggtcacctttaaaatccctgtctttgatgatgctgatttggcctttgctaaagggattcaagaacgctaccaaccagatgttctcttcttatctgcaggaaatcctgagcccaaggccacaggaaatattgtccaagaccaactggaccgcctcaaagaactctgggaacgcgtcgctgctgacgatagctggggcaatgtccgtgtccttcctcaactccataccctcctctacgacaaccaacgtggtgtttaaattagaaagaaaaaatcatgtcacaacaagaagaaatgaaaaacctaagcctcctcggcaacaaagaaaccaactacatttttgactatcaacccgaagtcctcgagtcttttgacaatcgtcatgtggaaaatgactatttcatcaaattcaactgtcctgaatttacctccctgtgcccaatcactgctcaaccagactttgcgaccatttatatttcctacattcctgacaagctctgcgtcgagtcaaaatccctcaaactctacctttttagttatagaaatcatggcgatttccacgaaaactgtatcaacaccatcgggaaagacttggtcaatttgctagaccctcgctatttagaggtttggggaaaattcactccgcgtggtggaatttcaatcgacccctactacaactacggcaagcctggaaccaagtatgaaggcctggcagaacaacgcctcttccaacacgatctttatccagagaaaattgacaaccgttaatactcttcgaaaatctcttcaaacttcgtcaacgtcgccttgccgtaggtatggttactgacttcgtcagttctatccacaacctcaaagtaatatattgagcaacctgcggatagtttattagtttgctctttgattttcattaagtataaatacgaaaaagccctgttcctcaaactgaggagcaaggcttttttagtttcaattattcttctgttccaaggaaatttttagcaacaagtgctgcaagaactccaccaacgattggggcaaggatgaaaatccatacttgttgaagggctgcgccacctaccaatacagcaggagccaggctacgagctgggttaactgaaagtccagtgatgttcaatcccacaaggatcatggccatcaaggacaaaccgattaccaaaccagcaatcgcgccatttcccttgctttctgaagtcacggtcataataaccaagacaaacaagaaggttgcaatcacttcaaacaagaaaccaccaaagacagtaaccccgtttgccaaggcattttcaccaagactagcagttgacatacctgcgttcgacaagaggaagaagaccgcgccagaagcgatgaaggctccaactacttgtccaaggatgtagtttacaagttctgaagatgacaaacgtttgtttacaaacatagcaatcgaaaccgctgggttcaagtgagcacctgaaacagttccgattgagtaagcagcaaccacgatggccaaaccgaaggcaaaggcgattccaaggtgaccaaggccatcaagaccatttccaaaaacaacagctcctgttccaatgaacacaagcatgaaagtaccgattaattcagcaacaaattttttcattttctttctccttttttcaaaaactagatactagtctatcaaaagagggaaagggtttcaagaaaattgattggaaatttcaggttaaaattctgtaaaaacggtagtgtttatttgaaacatttttttcaaaggtgtatactaatagcgtagttttgataggggttacaaaactcattataaaagctcatttgtaaacctttgctgttcttttatgaacgtttgaatggtatcgtgaataccaaggaggaatcatatgtctaaagttgctattgtcacaggtgcaggtcaaggaatcggttttgcaattgcgaaacgattggttcaagatggctttaaggtaggagtcttagactacaatcccgaaacagctgaaaaggctgttgccgaattatcagctgaaaatgcctttgctgtcgtagctgatgtttcgaaacaggcagaagttgcccaagcatttcaacaggttgttgaccattttggtgatttgaatgttgtcgtaaataacgctggagttgctccaactactcctcttgatacaattactgaggaacaatttacacgtaccttcggtatcaacgttggtggtgtcatttgggggtcacaagctgcacaagcgcaatttaaagcacttggccacggaggtaaaattatcaacgcaacttctcaagctggtgtagtcggtaatccaaatctaactgtttatggtggaaccaaatttgctgttcgcggaattacgcaaacattagcccgtgatttagcagactcaggtatcactgttaacgcctatgcaccaggtattgttaaaacaccaatgatgtacgatatcgctcatgaagttggtaaaaatgcaggaaaagatgacgagtggggtatgcagacattcgcaaaagatattaccctaaaacgcctatctgaaccagaagatgtggctgctgctgtcagcttcctcgcaggaccagattcaaactacattacaggacaaaccattatcgtggatggtggtatgcaattccattaagatacacaaaaagaggttggaaaatgattcaacctcttttattagtttttattatcaggtaggaggatacaatagaaaccctattactaagtaatactagttaatccctagtattgaaaagactggatagcttctttcaagtcatcttgtaaactgtttctctggtcaagttggacatagacttccaacaaacaggatctaaagttggaaaatttgtaaaaatcctccctttcttctatcggaaaatcaacagtttttatccaagaggctacttgctcttgcgctaacttcccttgtaaaatcggttcataaagtactctggctaaacgccaatcttcatcatctgtaaaacgaatgggaattcttttaaataatgggccaagtatgtcaaagacttcatgaattctgtttttaggaaagtctggatgacaaaccacctctgtcagtaaatcggctccatgtgcaaaagcatgaacccgaccatactgacttgaaaaacctgttgtatccttttcttttgaaagatagtacaacccttgatttaaaaggacattacgaattcctgcatttaattcctgataaaaaatcgattgctggttggcatcagcagacaagagatttgcataaataagcgccctaaaagaacgttcaagtgttgacaagcctaccttatcaatctccttatctaaccctccatcagatgaaatcccttcagcaatgaaatgaaattgttcctgtgtaaatagctcttcctgaatccctctagcaaagcttgtaaaaacaaggtcatcgcgaatttctggagaagaatctcccaaatgatcaagcaaccattggatttcctcctgatgataacttggtttttcttcttctatttttctaagtaacttttgatacatggtcaatacttctacatttctagcaacttgatataatctagaccccatttctcgacagcatctaaaacaactctgaattcctgccccatttcggttaagctgtactcaactcgtggtggaacttcggcatagacctttcgttgaacaatcttatccttttctaattgacggagatgacgggtcaaaatagtttgagtaatcccaggcaataatctttgcaattctttaaatcgtttggtacccgtactcaactgataaatgattaccagtgcccatttccccgttaaaaccctctgcgttgtcgcaaatggacaaataccatactcactcactttatttgtcataaaatatcctctttctattttttaaaaaaaatttatcttttagtatcaataatagtactacttttgatactagctatcgaaaaagtatctacttgtttttttgtttgtaactgttacaattatatcataaaaaagaaatggagaatatatatgtcaacaaacttagaaattttcaatgcttataaccaagctttaattgctggtgactttcccagtgtctttgaaacgatggcagacgatattatctggcatcaacctggtactcatagtatatctggttcagttggtggtaaggacaagctaggaactcacctggctacatttgctgagaaaactagtggaacctttaaggtgataacaaattgggtttctgacaataaggatttaatcgcagccaatgttacttttcttggaacacgtgctgatggtactgaactcaatatgaacgggattgacctcttccgcattgaagacggaaaaatcaaagaagtttggctcttctcttcagatcaagctgaagaagatagcttttggggataatttaagaggccaggacaaaaaattttgattttaggaattctttattctaaatttttaaattaatagattagaaaaaaagcgaacaagacagaattctgagtgtcagataactcgttttgttcgttttttatatttaaggttagacttttatcccagactcttttaatttactctcccaactgggcactgtaggcgatgatctgatcaactgtgtctgacaagaattggattgtatcacggagtggtttgtctgttgaaatatctgctccgataatcatagctgactcaagcggtgtcttgctaccacctgatttgagaagtttgagccagtcttcagctccagtttctgaattttttagatgaaggtaaccagcagtcgagataactagtcctgctgagtaagtgtaactatacaagcccatatagtagtgagcttggcgcatccaagtcagagccgcatcgtcgtcaatttcaatagcatctccccagaaatctgtcaaaacttccttcataatactgttgagtttgcttgctccaaaggtctccccttcttcaatcaatgtatacaccttacgctggaaggctgcttccaaaaggtgggtaataaagttatggaagtaggtgtctgtcaagcggtgagcaagagcgaagcgtttttgacgtgggtcgtcagattggtgttccaagtaatcactgagaagcaactcattgaaagttgacggtgcttcaacatagtaggtcgacatgtgggcattaaagtagctttggtgattatctgaaaagatgaattgaccagaatgcccgatttcatgaatcaaagtatagacatcactcaaacgacctgtccagctcatgaggacataagggtgcacgcgatatggatccgccgcataaccgccagaatccttgccactattggcagcaaagtccacccagcgctcttcttgatagcgagcaacttcttgacaatattctttccccaaaggttctaccgacttcatgaccaaatcataggcgtcgtcaatagtcacttgaggatttagggcgctatccaagtccaatttccaatctgcaaaggtcatcttttcaagaccatttactttggcaacatgcttgaggtatctctgagcaacgggcgcaaaatccttcatgatgaggtcaatctgacgatcaaacatagcacggtccacttcttgctcagccagaaggtaatcaaagacagagtcgtaacccttcatatctgccaatagtttttcagacttgacttgggctagataggctgctgcagccgtattttggtgcttacgaagaccttctgagaaggaacggaaagatttctcacgaacctcagcatcctcgtggttttggtagaaattctcataggtcacaaagctgtttttgtaggtcttgccattgacttcaaagtcggccatttcaaaatccccagctcgcatcttagtgtaaatgtcctgtggactgtagaaaacttcaccgagattggtcaaggccttctccacatcagcccctagatagtgggcttttttgatttttgcctgacgaatagccgccgtcaaatgaggtaattcacccaaacgatccaagacttcctcatcagcttccaccaaggcatcgtcaaagaaggtcaagactacgctagcatctgtttcaaattccatcccagcttgggcaatgttggcaaattcgtcattgctatagtctgtcgtctgaggcataaagccatagttaccaatatggctcatctgaatgtagatttgctccagttccgcaaaagccttttcaaaatcctcaaaagtatgaagattccccttgtaattacgactaaactggttgatgtcttcgcgagctttctcgattgcacgcaagaaatcctcacggtcttggtatagggctgttaaatcccaaagttccttctctggaaattctgaacggtgtttttgttccattttcttcctcttatttctctaattctaataaaacactaagggctgataaggcgtaaagcggtgctgtttctgctcgcaaaatacgaggaccaagacctgccaagactgctcccttagcttcaaaactttcgatttctgcaggtgacagaccaccttctggaccaaagataaagagcaatttggctcccttctcgagtccattaactgcttgtaaaagcgcagcggcttctccttcttttgccgactcttcataagccactacaatgcggtcaaattggtcaagttgggctagaaaatctcctttcttctcaaaaagcttgatacttgggaccaaattacgcttgctttgttctgctgctccaagggcaattttttctagtttttcaacctttttacccaatttcttgccatcccacttggcaactgaccagtctgctgggaaggcccagatttgactagctccgagttcggttactttttgagtgataaactccagcttgtctcccttgggaaatccagatgcgatggttacttgaacgggcagttccacattgtcatctagttcttggaccaactcaaactgacgagcttccacatccagcacatgcgccaaacgcttgactccatcatcaaagaccaaagtaacctcatcatcttctttcaagcgcattacctgaaacatatgcttgctggtttccttatcctcgatgatgactggcgaggtagcattaccttttacaaaatactgctgcatgctagcctccaatcacaccggaaatatccttggttttcttaaagacacaggcattccattccccttgaaccatgtgagtttcgaggaaaaatccagctgactcagccgacttgcgcaccatgtcccacttgtccttgataatcccactcatgatgaggtagccttcatccttgaccaatcgataagcatcatctgtcagatgaatgagaatatccgccaagatattagccacaatgacatctgcctcaatctcaacccccttaagcaaatcacctgcagctacatggatgttttccatgccagggttgagctcaatattttcctgagccacacgaaccgctacatcatctaggtcgtaggcgaaaatttccttagcacccagtagcgagctagcaatagagaggacgcctgatccagtccccacatctagcactgtttccccaccacgaagaacctgctccaaggcaaagaggctcatcttagtggttggatgggtccccgtaccaaaagccatgccaggatccagcttgataatcttttccccagcagtcgcctcatagtctgtccacgacggcacgatggtcaaatcatgagtgatgcgagcaggttcatagtatttcttccagttgtctgcccagtcttcctcagccaaggcagtcgtccccatcttgacttcacccaaatccataaaatctgtcaattctgctagacgagcctgcaaatctgactcaaccgttgctacatcaaccgtatcagggtaataggctgtcactacgatttcttcttgctgctcgacctcagggaaaatttcaccgaaacgattgacgttgcccacatagtccatactgtcttcaatcgcaacaccctgggcacccagctcaatcaagagattagagactaactcctctccctcacgcttaactgtaacttttaactcttgccatgtttccattattaagataccaagcccgtaaaacacaaagccaaaataggaaattctctgaagacgcttgtgtctaagagaagtttatctttttggcacagtgtttagggcgggttcagtttagaaatttaaccgaaccatcctttctaatcacttacttttaaataatcttttaatctctcttgcaactgaggtacagcttgactggagctaagaaattcctcgacattcatcagctgatggccctgtccttcatctccaaaggtaatattgtcaaattgttcttgtcttagctgaccaaccataaagacagagtaccgaccttcatagagcacacttggataaaccctactccaaagcagacaatcctcagtcagatgaatccccagttcttcataaacttcacgcgccgcacattcaaatgggctttcgtccccttcacggccaccacccggcaactcccacatattgggccaagggatattttccttatcatcacgcaagatgaccagtagcttatcaccacaaaataaggcaatcttgcaaccttggaaatcagtaagttctatttccatattagactccttcggttaattccttttccagctcagctaaccagttttgataatagcttttctcatcccgtaacatccgactgctattcattttctgtctagcaatcttcatagccttgtgagtttgaactacatctttctttaccttaaattgataccaagcttgaatgacctgcatatctgctgtttttagagataaaaaggatttgactcctcgaatacttgcatattcttccgccttcttattatctccttccatcagagcaacttgaagaaggtataattgagaactagttttagacattggattgtctgttttatctaacacagactgaaactgttgctttgcaagttctatattatcatccaatatgaataccaacccctgaagagtctgaacactttctgcaaaactccctctcacctcctcatcaacaggcatgataaagtcttttaaatcatattcttgaggagctagcaaggtctgggcagaatgcctcaacatcaggtaggcgtatttcgtattttcagggtgttgtagcaattcccaaatttttgctccatcggtgatgccgactggcaaaatgttatttaggaagaaagacaaattaagaaaaatccaagtccctgcaaaataccagcttcttgtcaaaaacccaaacactatcgccaataatatcaagctgagatgaaccatcaagcctcctgaaagcatcaggatgatgctttgatcgctttcatcctcttttaaaccaatgtattgagcaccaacatttttcataatggctgttctactaagacgaaacttgcatgactttttggtcaaaataaaatgtcctaatccaaaagccaccagccgatagcctgtcaagtagccacaaaaagcatgtcccagctcatgaagaataaagattaaatacatgcttagaagagcgaaggcataaccaaaagtaaagactaaaactgcggaataccccagctctgcaaatgcgatggttccacaagcaaaagccagcataataaagacaacagctagcacataaaccaaataaatcccaattttcttcataaaatctccaaccaactcctagtatctcggataaggataaaactctccctcttccaagccgacttttccttcttcaaagacttcttggttccattccatgacgaattcttctgcttctgggtcttccaaaaagtccatgagggcatctagtccaacctcggcagtatctttgaggaatagcgcaaaataagctaagaattcgcgggaaaatccttttttaggcaagtaagggatgacagtcaaatagtcttcctcattgactgttgatttagcaggattgtaaaaaagcactgcttcttcaaagaggatatcttctgatgaaacctctccgtcttcatccaccatctccacgcctgcagcattttgcgcttctaacaaaaaactcacttcaaccgcgtggttgcgcttatcccaactaatctcaaagtcaaaaggaaaattcttctccaactcttcctctaaaacatctaaaaatccgtatgttgccattttgtcctctttctatgcgactctttaatcgccccgattgctcggaaatatgctaaaatagatactaccatcttaccacatatacatcagaaaatctacgttagaaaggactgctatgccagacaatctcgcgcttcgcatgcgccctaaaaccatcgaccaggtcatcggtcaggaacatctggtcggacaaggaaaaatcatccgccgcatggtagaagccaaccgcctgtccctccatgattctctatggccctccggggaaatcggcaagaccagtattgcctctgccatcgcagggactactaagtatgcctttcgaactttcaatgcgacagttgatagtaaaaaacgactgcaagaaatttgcggaagaggctaaattctctggtggtctcgtcctattactagacgagattcatagactagataaaaccaaagcaagacttcctcttacctctcttggaaagtggtctggtcatcatgattggcgctacgactgaaaatcctttcttctctgtcactcctgccattcgtagccgtgttcaaatttttgagttggaacctctgtctaaccaagacgtcaaagaggccctgcagatagctctaagtaaccctgagcgtggttttgattttccagtagaactagatgaggatgcgctggatttcattgctacctctacaaacggagaccttcgctctgccttcaactcacttgacttggctgttctttctactcccgaaaatgacaagggcatccgccatatcactctagacatcatggaaaatagcctgcagcgaagctacatcactatggataaggatggagatggccactacgatgtcctctcagccctgcaaaagtctatccgtggctcagatgttgatgccagtcttcactatgctgcccgcttgattgaggctggtgatttgccaagtctcgctcgtcgtttgactgttatcgcttatgaagatatcggtttggccaatcctgaagcccagattcacaccgtgactgctctggatgctgcccagaagattggtttcccagaagcccgtattctcattgccaatgtcgtgattgatttggccctttctccgaaatccaactcagcttatgtggctatggataaggcacttgctgacctcaaaacatcagggcacttgcctattccgcgacacctgcgtgatgggcactacagtggaagcaaggaactggggaatgcccaagactatctctatccacacaactaccctggaaattgggtcaagcaagactatctaccagaaaaaattcgtaatcatcactatttccaagcagaagatactggtaaatatgaacgggctttggctcaaagaaaggaagctatcgaccgtttgcgaaaaatctgaaatccttttcaaaaaattgcactttcctcttgattttttttgtaaaaagtggtattatataaacatagaaacgctgtggtgtacgacttcacacttaagtgttgaccgactattttttgtattattagggaaacaaaagtcttctaacagcatgtaggccgtctcacacggaaacagcttcagttagagcgagttgcccacctgcttaattgcgcgggttcaatacaaaccgtgaagtttcggcaccaatacagcttttttctttgcctccttagctcagctggcagagcagcggactcttaatccgtgggtcacaggttcgatccctgtagggggcatctaaatacaacaggaaaaagccttgtaaatccaaggctttttttgcttgtctataactgatttaccccatcatttgtcccacattttaaatctatcttttctttttgaatcaaattacatctttacaaatagtgtaaagccagttacttttgctttgattccatacaatattttcatgtagagaagacaaattttatcttctctttttattttcaaaataataaaaactgattttcttttcataaatcagactgaaacttccaaattttccattttgtttattgacatttcctctaaaaaggtgtataatatttttattatcaaactatactatactatatagggggtattgaaatgaaattttctaatcgtttactgctattccttgcaggagttgtttttgtccttttaggacttttcctatttacaaacccagtagctaatcttgttgcttacagctggtggattgcatttggtttactggtttcttctatagcagctattttaggctatttctctgtaccaaaagagcttcgctcaccagctcatcttttccaagggattgttaatcttctcttagctctttacctcgttgcctatggctttgtgacgctgccagttgtcattccaactattttaggaatttggttaattgtagaagccattatagttttctttaaaggcaatcgtctgggattgattttccctattattggcaaccatatcatgtggatagcgttgcttgcatttttactaggtctagtgattttgttcaatccagtagctacaagtgtctttgtcgtttatgtcgttgcctttgcatttttaattgttggtttcacctatatccttgatgcctttcgtaaataatctagctgccattttgggcatattaaaatagctgggaagttacattctcagctttttctgttgcctccttagctcagttggtagagcagtagactcttaagctatggggcgcaggttcgagccctgcagggggcacatctaaatcaacagaaataagccttgaaaccaaggctttttttaacgtctaatagctttttgtagaaaagtatttaaaaataaaagagaagagaatctctcactctcttctcagtatatcttattaaatttagtttttcttaatctagctgattttcctttgcaacgacaaattccttaaccaatcgatagataacagcaaatatcggtgtaaagaatatcatcccaagtaagccaaagagattgcctccaatactagcagccgcaagcgtgaaaatagctggcaaaccaatagattgacctacaactctaggataaataaggtttccttcaatcagctgtataacttgatatagaagaagagaaagtaaggcttgagtaggactcactgtgaagataaaaatcgctcccacaacacaagcaatcataggccctacataaggaatgaacgatagcactcctgcaaatatacctgtcattaccccataaggtagtccaaacaggctgtagccaaccgctatcataactcctatgatgactgcttcaatcagctgactcatcaaaaattggtcataagtctctagtgctacttgtccaatgtaagttaactttgtcaccactttctctggaaatataacttttagaagtctactcgtcatcgctgccagatgttccttactggataaaaataaaaaggtaaatactataatcagaaaggcattcattatactttgaaaaaatatttcctatattactagtcagaccggataagaaggttatcaaagcttgactaatagagctagactgtccctgaattcctgatacgatagttgacagcatgtctttggttacaaattccgagctgtctagcaatttcccaagttgagtcaggactgttgaaaggactgctcccagctgactaatagtctgagcaagggttggaagcaccaaaaccaaaagacagatcacgattaagataagagataggaaaacaagcaccatagcaatcggacggcgcaaccctgcctttaccttcattttaactaggaattcttcaatttttttcatgggaacattgagcacaaaagcaatgacagcaccataaatcaaggtagaagttacttcaaagagagatactgcccctgatataaagcttgatgcattcagaattacaagagtaaccagccctataaaaagtattaatggggtgtatttttttactaaattcataaattctccttaataaacatgtttagatacgactatactatttggtttttcaaactctcggtcaaggtaagcttggtaagttcctggtgcgataaatcctttgggtgagaggatatcggtgccagcctgaccgactatggtatcagccaagagcacacagtttgtagataagacaaagtaggatttaaacttagatttgataaatttataaagttccccatctgtctcatgtctgattttataagcgtaggtgtagtcttccttaccatcacctgtcatgattttatctgcacttggctcccatggaatcgtcagttgtttcaattcagccaactttttctgaactgctttttccatttcaggcgtcaaatctatcccataaccaaaaagcgttttttgactctcacgtttacataggtcaatgtacttgtcacgatcacagaaatataagacaccatctcctaccatgccaaataaggtctcagaagacggatcatagttgccataagaaataacacggccttgatagcagatatccacatgaccaattgccgaaaacagagaggtctcagctgtatgaacaaaaatttcaagctccgctgtcttaccagacttcaccattccaagatggatatcctctctctcatcagcattttcctgcatgaatttgttgatttttgctaaagttcttgcagggatgagagcggctaggacaataggtaagctaattctaatacgacgtttgagatggtttttcccaatttccccttcaaataagaaaccgtcacggatattggacagaccataaaggaaaaaataagcccctaatacaaagagttgaaagacagaatttcctgtagaggacaaaagactagtcccaccaagaaaaactagtacgagtccatctagtaagagacgaaaacgaggtcgaattttgtttttgcggtagagaacataggtgacaaggttaatactagcatgaaaaatctgataaactccaatcacaagagccaaaatataaatcggcacatccgtcgcaagattggagccaagcaaatatcccagcactaacaatttaaccagtgcaactcccaaggtgtccgttgactgactttttttgaaaatacgtaatactaaatctaagaccgttgctatccaagctaaaaacagaaccagtcgaataacctttactggcaaccaagtccccgtgaccatcaagatgagacctagcagaacaaacaagaacccctgagcaagtaatttcttacctgtcagacctaaagatagaattttcgccatataaaaacctttcaacaataaaaattaaacactccgattaaactgactagtaaatagccaacactacaaacagcctgtgccagcaacatatggtgactagaaatgactgtagtaatgtcaccatcttgtcttatgcacttctaaaatttgttatattgattagaagccagagcttataaaaactagctaaactcgagagatagacacaattgcgacgaaaaaatgtataaccaattcaacttgttaaggtaagaaagcattatttccaatctattaattattcatctattacctattatgacacaatattccctatagttcaactttttacttgtttttatattacacggactaaaaagttttcaacagttgattgcatttgttttaataagttttaacctttcttggttagataaaaaaagaaccatacagtttagaatctgtatggtttttgccccacttttgtcccatttttaaatcatgacattgaaaatacctaaaatcacttatatttcaatatttttaattgctctcaatatgaaagtcctttccaaatccctgtagggggcatctaaatcaacaggaaaaagccttgatttacaaggcttttttgcttgtctataactgatttgccccacttttgtcccatttttaaatcatgacattgaaaatacctaaaatcacttatatttcaatatttttaattgctctcaatatgaaagtcctttccaaatccctgtagggggcatctaaatacaacaggaaaaagccttgatttacaaggcttttttgtgtatctgttctacttttggtcaactaatggatatcaacggtataattttatgaacacccttcccagacagctctaatctgattgcactcaaaattttttaaaatttaaaacaaaagacttgcttttcttttaatttatgttataattgttcttgtatctgatacaagtttattaagagagggattcatatggatacaaaattctcagttgctttgcatatcttaacaatgattagtgaaagcaaggaaaccttaagttctcaagcactagctattagtgttgggactaacgctagttacattcgaaaagtgattgccttattgaaaaatgcagatttgattcattcccagcaaggaaaaacaggttatcaactcagtaagtctccaaagaaaatgactttactagagatctactatgctactcaagaaatcaatcacattagtttattccctgttcatcaaaatagtaatcccgattgtcccgttggaaaacatatccaaggagcagtttcaccgcttttcgctagtgccgaatctcaattagagaaggaattagcaaatcaaactttagaagatgtcattgacaatctatataaacaagccaaacaagtccgaaactgatttgatagcaagtcaagtcagtttttattggaaacaacatatacttgtatcagatacaggtatataaaatcatattaaaaagaaaagagaaaacacatgaaagtcgcacaacacactacttataacaaaaacaatatcacactgaacatcacagaagttgctaaaccaagcattacagacaaacaagtcttggtaaaagtaaccgcagccggggttaatcctctcgataacatgatctctcgtggcgaagtcaagatgattgttccttacaaacttcctcaaactgcaggtaacgaagtggttggaatcgttgaaagcattggcaagaaagttaacaactttcaggtaggagatcgtgtctttggccgtctgccacttgatcatatcggtgcctttgcagaatacgtagctgtcgatagccaagccttagccaaggttccagactatctatcagacgaggaggctgcttctgttcctcttactgccttgaccattatacaggctcttgaactcatgggcgctcaagctgggaaaacgatctttatttctggtgggactggtggtgtcggtggaatggccattccaattgccaaggccaaaggtttgaaggtcatcaccaatggagctggagatagtgctgagcgtgttctgaaactaggagcagatagatttatcgattacaaaacagaggattatacaaaaactgttagccaggttgattatgtcctcgatacacttggtggggctgaaactgaaaaacaaatgtctatcatgaaaaaaggtggtcatcttgtttcccttcgtgccatgccaaacggtgcctttgccaaacgcatgaatctaccaaaatggaaacagatgattcttggcttagcaggtcgcaaatttgataagatggcggaaaaatatggcgtccactatcattttatctttgtagaaagcaatggcgctcaattacaagaggtagctgacctctttagtaaattagaaatcaaaccctctatcgatacagtttatccatttgaagaggtaaatagcgcattagacaaggtcgctaatggtcgctcacgtggaaaaacagtcctcagctttaagaaataaaaaggaaaacacaatgtcatatcttactacaaaaaatcaatacatcacagtcgacggaaacaaaatcgcttatcgcgaacttagtaaaggcaaatcaaaactacctcttctgatgctggtccatttggcagcaactctcgataactgggaccctaaactcttggacttgattgctgaaaagcaccatgtcattgtagtcgatcttcctggtgttggagctagtcagggcaaagttgcttcgacgattcctggaatggctaagcagacaattgactttgtaaaagcgcttggttacgataaaatcaatcttctcggtctttctatgggaggtatgattgcccaagaaatcatccgaatcaagcctactctagtcaatcgtttaatcttggctggaacaggacctcgaggcggaaaagaggtcgataaggtcacaggaaaaacctttaactatatgtttaaagcgggactcgagcgcaccgatcctaaacgctatatcttctataatcatgataaacaagggaaaattgaagctttgaaagtcctaggacgaatggggatgagaacaaaggaatttgcggataaagacatgaacctatcaggattcctaactcaactcaaagccattaaacgttgggggaaagattctcaagacgacctaaaatttatcacccaagcaaccttaatcgtcaacggggataaggatatgcaggttccaacggaaaattcttacgatatgcatgagaaaataaaagatagcaagctgattatctatccaaatgctggtcacggttcgatcttccaatatgcagacgaattttcaacagaactaatagctttcttagaggactaatatggtcaaaacaattctgattacaggtgctactgacggtatcggtaaacatttagcaaagaaattggccagccaaggccatcatatcatcctccatggtcgaaatcctcagaaacttgagctggcacttcaagaggttcgcgcaatttccttgagagaccgagtttctagctacttggcagatttttctaaattagatgatatttatcgatttgtagaggaaattaagcgagactttcaaagtatcgatgtcttgtttaacaacgcaggcctttatgcagggaaagaacgaaaagcgagtgctgaaaatgtcgagttgacttttatgttatccgttctcgttccttatattttaacaactgagctaagtcccttgttagaaaaagcggctaacggccgtgtcattaacacttcatcctatatgcatcattttgcaaaggtcaaggatttggacttcggatttgagaacaactataatccaggattggcctataataattctaaattatataccatttggatgacacgctatcttgccagagagttctttttaagaggttcaaatatcactattaatgcctaccatcctggcttgatttcaactaacttagggaatgattccagtgatgaaaagacgaaaaagtctctcttcggacgcttgatgaagtcattttccaaaaatctagacgagggaattgaaacaggctactatcttacattgtcagaagaagtcactggtttgactggctactattttgatgagaaaaaagtgaaatctgtatctgaaaaaggctatacttttgagaaagctcgagatttaatcaattactgtaatgataaaattgagttgtttaaacagaaatctgctctgcttaattagaaaaaaaaattctctttccattttgctagaaagagaactttttctttaggagaaataacttatactcaatgaaaatcaaagagcaaactaggaagctagtcgcaagctgtacttgagtacggtgaggcgacgctgacgtggtttgaatttgattttcgaagagtattaatttttaatcgattcgtgatagctccgctggcactgttaagtaataggttgccgtcaagcttgcttcgccttgattgacaaaaatctcgatggaatttttatctagaataacttccaattctttagcttcaagatctacataccgtcgactagtgtcctgttcttcttcacctagaattttttgaacaagatggctacgatcaatgtaaacttgctgcgcattactgtcataaccaaattcaagataatctgtatcatttcctaagtggtaatgacaatctttatctatttggatttgatattggccttttttaacagggaattgtcttagtttgccatcttccaatcttagaattctaggtaaagtcatggcacatgcccatttgtgttcttggtcatgggttggaagggtacgcccccatgtctgcatccaagcaatcaggatacgacgattttgatcgtccaacaatgtttgaggcgcatagaagtcttgcccatgatcaatttcttgaactgattctgggataaaacgtttttctccccaatctaccttacccgtgaacaaaaccgatgagttgatgttatgatatgagtctccttcacgctgataacgcatgggtgacataataaggcaatctttcccatctaactcaaagtaatctgggcattcccacataaagccttggtgttctaccccttttaaaaagatggattcgaaccgccattctactaggttatcggaccctagtagaacgatacagcccacattatccttgtgtttggcagctactacggagtaatagcgtccatctttttcaaagagttttggatcacggaaatcagctgcaattaactcatctggcaagtctgctccagttgaaactggattttgttcaatcttttcaaagtgaatcccgtcgtctgaaaatgccatattttgcacttgacggacaccggtttcttcttcgatgtgaccagtatacatgagccagagacgatcgtctttgacgatagctgatcctgagaagcaaccattgcggtcgtagtcttggtcaggagcaagtgccacaggcaagtgctcccaagtcaccaagtccttacttttagcatgaccccagtgcataggcccccaaacactatcataaggatagaattgataaaagagatggtattctccacgaaaatagacaaatccatttggatcattgatccaaccaatctcagctgaaaaatgttctttaggcttatattgagtatttacgagatgtttattttctgctataaaacgattggctttttctactgtaaatgttttatttatcataagtatatcctattttattccagttccggaaccacccagaccttgaacaatatatttctgagcgactacatagaccaaaatcaacggaatcgttgaaatagttaatacagccattacctgattgatataaactggttgagttgtattaatagttgtaattgcaacctgcattgaaaatttagaagaatctgtcaaaaccatcaatggccaaatataatcattccagcttgaaataaatgataaaacaccaactgtagcaactgcaggtttagacattggaagcataattctaaagaaaattctaacgatacttgctccgtccatctttgcagactcaagaatctcttctggaattgcaataaagaaattcctaaataagtaaatattaaatacactcgccaatcctggaataataactgcaagacgattattgaccaaacctaaggaattgataatggtaaattgtggaattaacacagtttctactggaataataagtaaagcaagtaagaaaccaaatagaattttcttacctgaaaaatttacttttgcaaaagcgaaaccggccagtgcattgacaataatagaaccaatagcaaacgttccagcataaaaaatgctgttccctagatatgtaaaaatactaaagcgctcaaatacttcctgataaggtttaaaccaatcagcgggatttaaacttggtaagaaggcttgccaactagtcaaatttttataaacatccgcttctggcttcatagctgaaactaccatccaaaccataggaaaaaggaagagtcctgccaataaagttaacagaatatattctaagattgttgttggtttaaatcgtttcatcttagtcatcctccttcagaactcgacgttgtactaagctaatcataccaattaacgttgtaaatactaaagcgattgagctagaatatcctacaagacgatcagtaaaaccttgttgataaatatagtacaccatagtaattgttgagtttaatggcccaccttgcgtcataaccattggttgtacaatcagcttaaaagcagaaattaaagttgttaacaatacaaacagtgctgttggttttagtaggggcatcgtgatataacgaaactgagcccattttgagaatccatccaattcagcagcttcatatacatcttgtggaatattctgcattcctcctaaaaataaaagcatctgataacctgcaccctgccaagcagaaacaaaaacaattgcatacatagcttgtttaggactagtcaagaaaggttgagaagcaatacctaccttatttaaaatagcatttaataagccactatttggatttaaaagataaagccaaagaatagaaataactaccaaggacatgacaactggagcaaaaaaagccactttaaaaaacatattccctttgcgctttttattaacaatcaaagccattcctaaggctgctcccaattgaactggaataatccaaacaacaaatttcaacgtattcaagaagctctttaagaaaatcggatcctttattaatcgaataaaattttcaagtccaacaaattttctttcatctggtgtcaacaaataataatctgtaaaagcgtaataaatgaccattccaactggaattactaaaaagatacctaataaaattaaagctggagctaaaaaactataacctagtatgttatcctttattttttcacgtctttttgtatccacaacagtttctttactcatatccatctcctttaatcatatatatcaaactaggctattaacaagaaaggggaaggtagttccaaatattttccttcctccttcctttttacagattatttgagtgactgatcaatagcagtttgcatttcttttgtacgagtatccaagactttttgcacatttggattttcttcataatagctaatatcttgcattgcttgttgaaaagctcgagaaacctgaggatatgctacgacaactgggcgagcatgagctgtttttgaattttgttccatcaagaaacgcattggttcggtcactttatctttgatattttcaattgtagatttacgaatcggaaggaccgaattccccaagctaataatttcacttgattctgtatttgtagcaaatttaacaaattcagatgctgcctcttttttatcagattttgtcgtaacagctaattgccaactacctgaaggggatactaattttttcgtcttactagatactgggtaaggaaggataccaaaatcaatatctttgtagtttgtattcatgtcagcaatcgtccaagaaccactcaaaagcattggatactctcctgtttcaaaacctttttcgactggactaacagttgtgtaaccttcttttacaagattttgaatgaattgaactgcttctacactctcttttgagttgaagtatccttctgcctttgttccatcttcgtttacgacagaaccattatttgaccaaatcaacggcatataagcatatggtaacatttcatcgtttgaattaatacgaaaatcaattgccggtttgttataatgatctttcaattttttagcaatcgtattaaattcatcccatgtccatggcttttctagcgttggaagctctgattccgcaattccggcctctttgaacatttttttgttgtaataaacaccaacattcgattcagaaaatccaaatgcatagaatttgccatcataagttccttgttgtttaatactgtccaaaacatcatccatattattatcttttagataatcatctagcggagtaatcactttagattttgcataagctgccgtatttggtccatcaagggtaataacatctggaagactattagtcgtgatagcagcattaaccttgtcttcatatcctccaccactaccactacgaggaatatactcagttacaaccttgtacttactttttcctgattgattaaagttatcaacaactttttgccaagcttttccttcattggtttcgtcagagaattgtacccagactttaatatcatttgaagaactcgcttgttttgagttagttcctccactacaacctgcaagtatagctaacgatagccccgcaacaacagataacattgtacctttacgcatatttttcctcctttttgaaacgtttcatttatagtttatattataacagcgctttcattttttgtcaagtgctgtttaaattttttttgttgttttatctccccaaaaatatgtgggaattacgattcgtttttctagaatctcttctcgcttaatcattttcagtatcattgcaacagattcttttgccatcataccaatatcttgaactattgtagacactagataagattgatcgacagaagtttttaaaccatcaaacccaattatctggtaatcatcaggtgctattttccccagttctttcataacactaataactctcagagccatcatatcatttattgtaaatataccatcaatttctttatgagattgcaaaaaaattcttatctgatcttcaggatttattaaaggttctttcatttcaaaattatagacatctactcctaattccttagctttttctctgaatcctttacttctgagtatagtctcattctcatacatattaattgaaccaataaaagcaaggtgcttattatcccttctaaccagttcctctgctgcagtttgtcctcctttgtaatttgctgaagtaacatagcatacattttccgaaaaatgtctatctatacttacaaacggtaaatcagataaaatatatttgtcaatatcagaatatgtaataccaataattccatccactttattttgtttcaacatttcgatatattcgatttcattttgtgaatcgctatcagcgttacaaataaataatttataattatattttaataactctttctcaacatgataggcaaactccgagaaaaatggatgccatatgctcggaataatcaaagcgatagtttctgttctattctttttcatacctcgagcataattatcagggatatagtccaatgtttttatagccctttgaactttccttaaagttacttctttaatacctttttctttattaattacacgtgaaacagttccaacactaactcctgcttctaaagcaacatctttcatggtaattgattttctttgttctaccatcttatcacctcctttcaatatatagtatcatgcaaacgctttttaagcaactatttctcaatcatttttgtccagattctttttcctatcatgaataaaatcactccaattatcttttgaaaatacttcaattttcatgtgtagacatctacataaaacaggaaaaaccttggaatcaaggctttttcgtatcttctacaaaaaaagcaagagatctagagggctatgaatctagatgtacattttgcttaaatgattgaatgtcttttcttaacaaaaacaccccaaaaattagattttttctgtctaacttttgaggtacagttcaaacgcgaaatagcgtttttttgttatttttggttactcatctaatcgaataaacatcatggcatttaacaaagatatgagtgataccttgtttatattatttgaatatatcagtctcttattctcaatcggaggaataataaaattagaaatgatgatatcataaggcgattcttctaaagattcctttgataattctaattcagtccaaacttcaagttcaaaattgttgctacaataataagaaagtgtctctgcaacggattttgcatgatactgatcaaaattactcataaccaggagcagctttaacattctatgagttgacaaattcattggaaagcttgtttccttatataccaattctaacaattgagataggggctctgatgaaaaattttcaaatagccattctaggaaataatatttttctgaaaaatattgtgcaaaaaagtaacgaatgtctctctcatttccaatgatttgaacaggggtcagactgatttcaaattgaaattgccttttaatcactttattgatttggctaataatacgatagagcgaagatgaactgatataaaattctttacaaatactctcagcttgacaaccttcattaaagaatataaattctaaaatcgaaaaatgagttgaatccttaaagaaatgatggtaaaccatttcaatatcactatcatcggtattaataatgcgtataccattagtcgaagaatgaaaaatcaagtcaggaaaagcagatttaacatgggatagatcatctttgactacacgttctgtacaatttaataactctgctagttcagaacgatgaaactaacgtttatgttcaaataataattctaattgcctatgacttttttagataataaatctctcatgaatgtctttctctttttataaattatcggatttcacctcttgcaattataccacaaagaataggtatagcatgatataacgacttttactaaaatcctttatttcgtataataacactacggaggcaatatataaacaattttcttattttaccgtctattgagggcgtgaatacaggatcaaattcaagtcgaaagattatatttttatttttaaaaatttatataatagcaacaatcaaagaatttgatttttttatattaaaattatataataaccaaaataattgatttttttatattaaaattatataatagcgataatcaaagtaattgatttattttttaatattaaaatagaaaaggagggtaagcaatattgtggtcaatcattgctggaggtcttattggacttgtagcaggtagaatcactaaaaaaggtagttctatgggaatcgtcgcaaatgtattcgctggtttagtcgggtcatctgtaggacaatcccttttaggtagttgggcccatccatcgctggaatggctttgatcccatctattgcaggagcagcaattgttgttactgtagtatcattctttacaggtaaaaaataattacttgtagaataaactatttttaaatagattagacgggtaaaaatagtttaatgttaaatcgaaaggattgtatatgtcaaaaacaaagaaaatatttttaattattttctgtattttaatcttgacaattttccttcctgttttgatagattatcatcaagttagtgatctaggcattcagctatttagctggagacagaatcatttcgttgaattctatctctctagatatatattctgggggatagtggctctatcaactttagttttgttatcgatattagttgtgttgttttatcctaaacgttatttggaaattcaacttgaaactaaaaacgatacattaaaattaaagaattctgcaatcgaaggttttgttagaagtttggtaagtgatcatggattgatcaagaacccaactgttcatgtaaatttacgaaaaaataaatgtttcgttcatgtagaaggtaaaattcttccttcggacaacatcgctgacagatgccaactaattcaaaatgaaataactaatggattgaagcagttttttggtattgagcgtcaggttaaactagaagttctagtaaaagactaccagcctaaaccaaaacctcaaaacaaaaagactgttagtcgtgtgaagtaaggaagtaaaaaatggaatggcttaaacaatatcgatatccaattatcactggtctcataggcgtatttctcgcttgtttgattatctcctttggcttcttcaaaacaatatttgtattgattttaggagcactgggagttgcagctgggttatatatcgaaaaaaactatatagataaataaaaaataaaaattactaatttaattaaaggagtttcatatgtcaaacgaaaaaaacacaaacactaacgtagaaaagaaagatgctactgctgtagctcacgaaatcaaaggggaacttacttacgaagataaagttatccaaaaaatcattggtctgtcactagaaaacgtttcaggtcttttgggaatcgacggtggtttcttctcaaatcttaaagaaaaaatcgttaacagcgatgacgtaacaagtggtgttaacgtagaagttggtaaaacacaagttgcagttgacttaaacattattgctgagtaccaaaaaaatgttccagctttatattcagaaatcagagaaatcgtatcttcagaagttgctaaaatgactgacttggaagttgttgaaatcaacgtaaacgttgtcgacatcaaaacaaaagaacaacatgaagcagactcagtaagccttcaagatcgcgtatctgacgttgctgaatcaacaggagaattcgcttcagaacaattcgaaaaagctaaatctggtcttggatctggtttctcaactgttcaagaaaaagttagcgaaggtgtagaagctgttaaaggtgcagcaactggtgtagtatctcacgaaaaaactcgtgtaaactaagataaaataaatataacaggaaaaattatcatgtcagtagaagaaaaattaaatcaagctaaaggttctattaaagaaggtgttggaaaagccatcggtgatgaaaaaatggaaaaagaaggaacagctgaaaaagttgtttctaaagtaaaagaagttgctgaagatgccaaagacgctgtagaaggtgctatcgaaggtgttaaaaacatgttgagtggcgacaataaataaggctaaaagttactttatctttttagtaacattagtcaaaagagtctgagtcaagatgattctcagaaaacaaaaagctagagatttccaattgcggaactctagctttttaattttgcctctttctcttattatatttcagcaggttgttgaccatgagtacgaatcccatgtcaattctcacttggcgcttacctttcagatgacatctcttataaccaaacaaacctttatctgcccaaagacagatttcatatcaatcttacgtttagcgaaaatttatctacccttggaagataaaagtgcctgatattctttaatttttaaacactggtaacgttcattcatatacagtcccttttgaggggctgattcaggttcatcatcgcagtcaagattgatttcaaggctgtttgcttctatctcccctttttcatgatgtattttcgtacaggtgcttcaaccacttgaacgatttcaaatccttctttttgataaaggtgctgggctgcttgatttgcttcgaggacatttaaagaaatactacctatgtctccattttcaaagaccaaactaacaaatttccttaaagcctgcctacctaagccttgtccctgtttctggggattgataaaaaatctcccgatatgaagattgctgtcttcttgcctgattttctggataagccccacaaactcttgtccttcaaagattgaaaagattccttccaaatcttgcaaaacttgaatggtcaagggaaaaggaatccttggtcccatccattgttcttgaaaaactttgccaagggagttggaccattggcatacgagctgagcattttctgtgctcaccttttcttcaaaacgaattgtcatctttgcctccccatcttatctatgtttctccattatactacttctcctattttttacgaatagataagtatgattaatatttatttttttcttgtcgggagcattctcgcttcctttcttggtttggttattgaccgtttcccagagcaatccattatccaacctgctagtcactgcgattcctgtcatactcccttgcgtcccttagatttgattccgattctctcgcaggtcttcaatcgctttcgctgtcgctactgcaaggttcgctatcctgtctggtatgccttctttgaactaggcttaggactcctctttctagcttggtctttgggctggctttccttgggtcaagtcatcctgataactgccggtttgaccttgggcatctacgactttcgccatcaggaatatcccttactagtctggatgacttttcatataatcctcatggctttctgtggttggagtctgattatgctcttctttcttgttctaggaataatagcccattttatcgatatccgtatgggagcaggggattttctctttttagcttcttgttctatcgtctttagcgtaacggagttactgatcttgattcaatttgcttctgcgatgggaattctagcctttctcctgcaaaagaaaaaggaaagacttcctttcgtacctttcctcttacttgctgcttgtgtgattatttttggtaagctactgcttgtctgataaagtcctgaattggctctccttgatgaagagcttttacgatttttgaaccgacgataacgccatctgacaccgcattaaagcgttctacatcggcttgactagatacgccaaaacctgtcaaaactgggatatcggccacttgataaagttgtgccaagtgcttgtccaaatctgcacggtaattgcctgatttccctgtcaccccgttgatagcaacggcatagacaaatccttctgcccctttaatcaactctttctggcgctcaattcctgtcgtcaaactaactaggggaatcaaagcgatgtctgtatctgccaaataaggctccacaaaattggcatgctcatgaggaaggtctggaatgatcaagcccttaaccgctgtatctgccaaatctttgacaaagttctccacaccgtactgaaagagggggttgaagtaggtcatgatgacaagtggaacctctgtttcaatggttttcaatgtttcaaccaaagcctgggtagaggtcccgtgggctaaactgcgcaagccagcttcttcgataacaggtccatctgcaacagggtctgaaaagggaataccaacttcaatagccgaaacacccaaatcttctaaaaagtgaattgtttctccgagtccatccaaacctttctcatggtctccagccatgatatagggaacgaaaattccttttccagctgcttttatagcgtttaatttttctgttagtgtcttaggcatgagcttctcccttctttgctgcatctgcttccaagaggtctttgacttgaaccacatccttgtccccacgacctgatagacagacaatcatggacttgtctggaccgagttctttggccaatttcaccgcaaaagcaatagcgtggctagattccaaggctgggataatcccttccacacgagacaagagttggaatccttccaaggcttcttcgtctgtcacagggacatagctggcacgtttgatatcgtggtagtgagaatgttctggaccgataccaggatagtccaaacctgctgagatagagaaggcttcaagaatttgaccatgggcatcttggagcacatccatgagagaaccgtgaagaacaccaggacgacccttggtcaaggtagctgcatggtgctccgtatccacaccaagtccagctgcttcagccccatacatggctactgactcatcttctacaaatggatggaagagcccgatagcattcgacccaccaccaacacaggctactagagcatctggtaaatcttgacctgtcaagtcacggtactgttgtttggcttccctaccgatgacactttggaagtcacgaacaatttctgggaagggatgaggccccaaggcagaaccaaggatatagtgggtgtcgtcgatatttgccacccatgaacgaagagctgcattgaccgcatccttgagcacgcgcgaaccgtctgtcacagcctcgaccttggctcccaaaagctccatacggaagacattaagggcttggcgtttgacatcctcctcacccatgtagatggtacattccatattaaagagggccgcagctgttgcagttgccacaccgtgctgaccagcacctgtttcagcgataattttctttttacccatgcgtttggcaagcaaaacttgtcctaaggcattgttaatcttgtgggcccctgtatggttgaggtcttcacgtttaagataaatcttggctccgccaatatgctgggtcaagttttttgcgtagtaaagaggagtttcacgtcctacatactggcgcaaaagttggtttaattcctcttggaaacttgggtctgcctgactttcacggtaagctttctccaactccaaaactgctgtcatcaatgtttctgggacgaaacgtccaccgaattttccgtaaaatccatctttatttggttcttgatatgccattctttaccctctttataaatcttctaatcttttcatgatctttttgtccatctgtctccactccgctcgatacatctactgcatagggagtaaagtgttgaattgcttttactacattgtcttcattaagcccacctgcgataaagaaaggctgagttagtcctgtcgtatccagttgcccccaatcaaaggtctggccactcccagccacaggggcatcaaagaggagatagtctgcctgagaattgggcacatgaccctctccatccacctgcacagcctgaatactggcacaaggcaaattctcaaataaatcatctgccacctgaccgtgaacttgaaccaagtccaagccaacgttgtcaatcgtttctagcagttctgcccgacttggtgaaacaaacacaccaacctttttgacatctgcaggaataagctttgccagctcggcagcctgatccaaagtcacctgtcttttactaggtgcaaagacaaaaccgatgtagtcgactcctgctgatacggctgtttccaccgcttctttggtcgataatccgcaaattttaacctttgtcaatctgcaactccttgattctctgggctacatcttctgcctgcatgagagctgtccctactaaaattccgttaaagtatggcgctactcgttccgcatcctgccctgtgaaaatagcagattcagaaatgtacaagcaatcatctttgaaatgtttagccaaatctacactggtctgcaagtcaacttcaaaggtagtcaagttgcggttattaaccccaataatctcagcaccaagcctgtgggccacttctagttcagctagattgtgagtctccaccaagacttccagaccaagctctgtcgcgtagtcatagagttccttgacacgttcttctgacaaggcagcgacaatgagtaagataactgtcgcaccagcattgcgagcacggatgatttgcttttcatcgatgataaagtccttgttgagcgtcggaatctctacctgactggaaatctcccgcagataatccaaatgccctttaaagaaaacctcatctgtcagaacagaaatcatcactgcgccgttttcttcataagtctgagcctgttgcacaatatccacatctagattgatatctcccagactagggctagccttcttgacttctgcgattacctgtaaacggtcttgatgttgttttagatagtcagctaaacgataggtctggcgcaggggctggatttcctccagctccagctccatctgctcgacctcacgcgccttctgctccaaaattcgtgctaaaaattcctgactcatttttggtactcctgtaacagtctgagtttttcaagggccttgccactagcaatgacttcgcgggccaaggcaactccatccttgatgctagctaccttgccattagcatagaaaccaagaccagcattcaagactgtagtttccaagaatggacttggttcgttcttgagaacactgagcaaaatttctgcattttcctgagcattccctccacgaatatcttcgatagcgtagccttccattcccaaatcctctggagtaaagcttgacaaggtgatttcgccattttcaagaagtgcgatgttagttgttccgttcaagccagcttcatctagcccttctggcccagcaaccacaatggcacgtttgcgacccatatttttcaaaacctgagctgtactttctagaagttctggacgactaattccaagaagctgtgtttccaaggccattgggtgaatcaggggaccagtcaagttcataatcgttggaattcctagttccaaacgagctggcatgatgtatttcatagctgggtgcatatttttagcaaagagaaagacgatgccagttttgtcaaagaccttacctagttcagctggtttgaggtcaaggttaatactcaaagcttctaggacatctgcggaacctgatttagaagaaatcgagcggttaccgtgttttgccatatgaacaccaccaccagccaagacaaaggctgcagttgtagaaatattaaaactgaaagacttgtccccacctgtaccacagttgtccatggcatcatgaatttcagttggaatatgttgggcatgccctctcatgacttgggcaatggctgtgcgttcttcaggtgtttcccccttcatcttaagagccaaaaggagagaagcaatctgtgcctctgttacacgcccagttacgatacgctcaatgacatccgtcatttccacacctgataaattttcaaattttgctagtttttcaataatctctttcatcctagtttcctcactttacaaccttctcgataaaattccgaatagaagacaagccatctggcgttccgatactttctggatggtactggaagccataaatcggtaggtttttgtgttgaatgcccataatagcttggtcatcagtcgaacgagctgtcacttcaaagtcttctggcatttcttcaatcaaaatactgtggtaacgcatgaccgcacggccatcctcgatgccttgatacaaaacagatggcgcttcaaagctgatattgctctgtttcccatgcatgacttttggtgacaagcctaacttcccaccaaagacttctgcgatagcttggtgacccaaacaaattcctagaatcggcttcttgccggcaaagtcacgaatcatatcttccatctttccagcatcaactggccaaccaggaccgggagaaaagaccagaccatctgctttttcagcttcttcatacagcttgggatcatcatttctcaagacctgtacttctgcgaaattcccaatatattgggccaagttataagtaaaagaatcatagttgtcaattaataaaatcatggtcttagttctccaattctagtcatagatttagccttgttaatggtttcttggtattcgttttgggcgatggagtcgtagacgatccctgccccagcctgcacataggctgtttgatttttgagaatcatggttcggatggcgatagcgaaatccatatcacccgtcgcagacaagtagccgattgctcctgcgtatacgccacgtttttctgtttccaattcatagatgcgtctcatggcccgaatctttggtgctcctgaaactgttccagctggaagtgttgatttcaaggcatccatagcagtgagttctggaagcaaacgccccttgaccacgctggtcaaatgcatgacatagcggaaaagctccacttccatatacttggtaacttggacactggctgtttcagatatgcgaccaatatcattacgacccaagtctactaacatccgatgttctgctgtttccttctcatccgaaagcaggtctgtcgccaaagccttgtcttcttcatccgtagcgcctcttggtcgtgtccctgcaatcggattggttgtcacgatgccatttttgacggaaaccaaactttctggactggcaccgataatctgataatccccaaaatcatagaaataaaggtaattggatggattggtcacgcggagatttctgtagaagtcaaatggatttccagtaacttctgctgagaaacgctgactgagtacgcattggaacatatcaccatttcgaatcaagtcacgagctgtttccaccatttcctcaaacttctgaggagcgatatgcggtttgaagtctaacggagatagatccaagtcttcaaattcatttggagcaggaatgcgtaattcctcaagcacttggttcaaggcttcttccaagttttcttgactacgctcactatagagagcatcctcgatgacatggattttttccttcttgtggtcaaagacaatgtaactctcatagacgaagaaatgcatatctggcgttccaatagtatcttcaggaatttgaccaatttcttcataaagcgaaatcatatcgtaaccaacaaaaccaattgccccaccaccaaaaggtaggtctgaatggtgctggctcttatgagtcacttcataaaggaaatccaagggatcctgatcaatcactttcccattttgataaagaactccatttgcaaacttaatctcaaaaactggattataagctaagatagaaaaacgagctgtttccttgtctctcggaatactttctaaaataaccttgtgttgtccctttagacgcatataagccaagattggtgataagacatctccatgaatgattcgttccattgtaatttccctttcagttccttatttttaattttttatctttttctatttcccttaaatagtgcggacgggaggtaaaattatccagtggatgattttagaaatccattaaatgaaagacttaatttttaagctcctcgctcattcatttctaggctcaggctaaaatagttccccgaactattttactctcaaaaattccgtcctatagaagcatatttgcttctataggataccactatggcgggaaatatcttttaaaagctcacttcgttcgcaaattttttgtagcaatctatttaataatgaacaataatctaaaactaaacagctgaacctataatagacatataaaaatccccacgcaaaataacttgcgtgaggacgaaattcgcggtgccacctcaattataggatttctcctatctctcattcctgtctcagatatttcctgtaacaggctgtgcgataaagggcactcccttgagaattatgtttttttctcttgtttcagatggacccaaccttacagttttctctgcttgtttccagcaaccacaagctctctgtgagagaaaagactgtaatttttccatcttttattttttagcttctaggtagtctgcaatcgcagctacgtccttgtctccacgaccagagacattgatgatgataatgtcgtctttacttagtttcggtgcacgtttaactgcttctgcgatagcatgcgaactttcaatcgctgggataattccttcagtcttgctgagaaggaggagagcctgaacagcttcttcgtctgtcgcagccacatattccacgcgacctgaatctttaaagtaggcgtgttctgggccaacccctggatagtccaatccagctgagatagagtaaactggagccaactctccgtcttccttaaagactgcataagtcttcatgccgtcgacaattccgatactaccttttgtcatagtagctgcgtgcttgtctgtgtcaagtccatgtccagcagcttcgaccccaaccaatttaacttcttcatcagccacatactgagaaaaagcaccgatggcattggaaccaccacctacacaagcaataacgtagtctggtaagcgtccttctttttctaagatttgacggcgagattcttcactgatgaccttttggaactcgtggacaattgtaggataagggtgaggacctacagcagatcccagaacatagaaggcttcaaggtcattcatccatgctccaaaggctgcatcaacagcatctttaagggtacgagtccctgtttcaactgcgtgaacagttgctcccatcatctccatacggaaaacattgagacgttgacgttccacatcctctgcccccatgtagacatcacaggccataccaaacttggctgcagctgccgccgtcgcaaccccgtgctgaccagctcctgtttctgcgattactcgttttttgcccatacgtttggccaaaagaatctgtcctaaaacgttgtttagcttgtgagaaccaaggtggttaaggtcttcacgtttgagataaatcttagcgccacctaagtggtctgtcaaactttccgcaaaatagagcggtgtttcgcgacctgaatagtcctttaagtaatggcgaaattctgccaaaaactctggatcatccttgtacttgtcaaatgtcacttccaactcatccaacaaagcctgaatcggctccggtacaaaactaccaccaaattgtccaaaataacctttagttgtcataaaattttcctctttctgtattggttccaagatatgaaaaaagcccacacacagaatctacttctgcgtgagggcgttggtaacgcggtgccacctcaattataaagggactatcccctttacatctctaccttgtctaacaacaagttgcactgtaaggtgtgcgcaccgaactttcattgtttcaaattcatttttaaaatcagcccactttcactacttccaaccacctgttcacaatcaccacaggctccctgaagatcaaaaataattacttttctgatttattgaacttattttaatactttgttttttctttgtcaagacttttttacaatttttttgatgaagctagtactttttcagaaactgttttgaaagtctcaatgatatagtccacttcttcatcgcttaatttagtgtgaagagggagcgtaatttcattttcaaagaaggcataagccttaggatagttcgccatatcaaaaccaagattcttataggctgtcaaaagcggaagcggtttgtagtggacattgcttgcaattcctgctttagctaattcttggataataagattgcgttcttctaaactcgctccttctacatgggtgatgtagaggtggcgtgaagattcgacagtttcagtcttgtgtgccaatggatggatacgagaacctgcaaaaccacgatcatagcggttcacgatctccttacgacgttctagcaaacttgggtagcggtccaattgtaccaaaccaagggaagccataatatcggtcatattacacttgtaggctggtgtgacgatatcgtattcccatgaacccagttgcatcttggcaagagcatccttagtttgcccgtgaagggaaagaatttggaattccttgtacatctcttcgtcgtcaatcgctggattggctttccaagtggcacttccaccttctgcagttgtaaagttcttaacggcgtggaatgagaaggaagtaaagtcagcgatagaaccagctggttgccctttataagtagatcccaaagcatgggcactatcagaaacaatcacgatacggttaaagggctttttgccacttgcttgaagcggtaaagagatcacgtttcttctccacaacttggaacaaacggtcgtagtcgcaaacaatccctgcaagctctactgggatgatcaccttggtcttttcagtgatagcttgctcaagcaggtcatagtccatctcaaacgtatctgcttggatatccaccatgacaggagttgctcccacgtgagtgatgacactacatgaagctgtataggtcatggctggaacgatgacttcatcaccaggtcccacttccaagacgcgcaaaatcaactcaagagcggcagtcgcagagttgaggcagacggtcttaggtgtctgtgtatattgagacaagcgacgctctagttcttttgtcttaggacctgttgtgatccaaccagaacgcagggtatccgctacttcagcaatttctgcttccgtaatatcgggtggtgaaaatggaatattgtaatttggcattgatttgctccttttatctgtactcattttcttatgactactttattttagcacttcaaacacggtttgaaacatgattttgatgtctccaaggaaactaaactctcggagataggcgaggttatagcgcatcttttcaggaaggacgtgttcgacataggcctggtcaactgacaaacctttctccgtcatttgactgatgatggtgtcctcatccttgtagttgatgctggctggagaggtaatccctgctggtaaaagcaaagtcgccatcatttcagggctatactgctctgtgtagcgtggcacttcaggtcgtgtaccgacaaaggacatctcacctttaaggacattgaccaactgaggcagttcgtccaaacggacacggcggatgaaattgccaaccttagtgatgcggctatcgttagcagaagtcaccagacttccttttttatccgcatccgtcaccatggtacggaacttccaaatcttgaaaggtcgattgtactgggtcacgcgctcttgcttgtaaatcactggccccttgctatccaacttgatccaaatgctcaaaatgagaaagatgggagaggtcagaaccagtacaaccaaggccaaaacccagtccaaacaacgcttgaaaatcagcgaacccttccttttagagacaagctggtagtaagactcaacctcgcttgatttcatttccacgggcaagtcttcccatttcagcatgctgtttctcctttgtttttattatactatttgtcaacatttttcattataccacaaaatggaaaaggcggtgaaagaaatctgtaatttgaaggatttccttcttacactcaatgaaaatcaaagagtaaactagaaagctagacgcaggctgctcaaaatatagctttgaggttgcagataaaactgacatggcttgaatagattttcaaagagtattaggccatggcccctacctgcaaactatacatcttgtgataggttcctcccaaggccaaaagttcctcatggcttccactctcgataatgcgccccttgtccaaaacatagatacagttggcgtcttggatggtagaaaggcggtgagcaatggcaatggttgttcgtccctgtctcatcttagccagtgaagcttgaaccagactttctgtttcagagtcaatatttgctgtcgcttcatccaaaatcaagattttgggctgactggcaactgttctagcaaaggcaagaagctggcgctgtccagttgaaaagctcgaaccacgctcggacacaggtgagtcgtaaccctgaggaaggtcttgaataaaggaatctgcatccacgaaggctgcagcagcctggacctgctcatcactaatgtcttggtacatggcgatattggacttaatggttccatgatagaggaagggttcctgcaagaccagaccgatgttttttctcagctcttcctgactgtagtccctaatatccacatcgtccaagagaactcgccctgattgaaattcataaaagcgcatgaggacattaataatcgaagatttccctgaacctgtatggcctacaaatgcaatggtttcacccttgttaaccgaaaaggaaatatcatccagaatctgatgtttcccgtcatatgagaaacacacatgttcaaaacggatattgccttctttgactttagcctggccattttcttgaagaggttcataggtcctctcgtctatcagggaaaagacacgacctgcagaaaccatagacgtttgcagggttgagaagttttgcgtcacttcaatcaagggatcaaagagacgattgatatactggataaaggcatacatggttcctgccgttattcccagataaagaccacgatagccaaaataggccatcaaaacagcgtatcctagaagtttcagtaaactcatggcaggacgcaaaaagagagcatccaaggctacagaacggttggcatagaccaagtgttcttggttgatttcatcgaattccgcctgcaggcgcttctcttgattaaaggcctgaataatcctgatgccctcgatattctctgccagcttactattgatatctgacaagagacttctggttttctcaatgattttcactgattttttccgatagagattgaccaaaaggaagatcaaggggagaaagagcaagactaatgctgtcaaacgaaaatccaataccaacatggtataaagagttgtcagaaagatgaaaactgctgagataaagctagataaaatccccgaaaacatatcgctgatggtctcggtgtcatttgtcaaacgagagacgatagagcctgctggtgtcttgtcaaaataggacatgcccaatttctccatattggcaaaggcatcccgacgaatatccctaacaatactgtatgacacccgtgcaaagagaagattaccgacatactgaactacagtttgtaggatataaaggccatagtaggccagcaaaacggtaatggctagttggttaagattactcagatactggtcgataaagtgggaagccacaaggggaatgacacttttgatgaccgtcgtcgctaggagaaaactgagtgccaaaaaggtcaggaggccgtaaggcttgagataggacatcaagcgcttcaatacagtccattgttctttcttattctgcatcttcttctcctttcatttccatctgctgagactggtaggtttgggcataccagccatccaaagctagcaagtcttcgtgtgtgccctgttcaataatttgaccattttgcagaaccaagattagatctgcatggacaactgcactcaggcgatgagccgtaataatggttgtcttgtcctttcgcgtctccttaaggttgtcgataatcgcatattctgtcttggcatccacggccgacaaagaatcatccaaaatcaagatatctggatctaaaatcatagcccgactcatggccagacgctgcttttgaccaccagaaagactgactcccttttcaccgataatggtctcaaatccctgaggcatgtctacaatgtcttgataaacttgagctagcttagtcgcttcctcgactgcagaaagggtcaagttcggatttccaaagcgaatattgtctaagatagaagtcgcaaagaggaattgatcctgaggaacataacccataagactacgaaggtctgtcagacgataatctctaatatcatgaccatttagataaatggctcccttgtccacatcgtattcacgcaagagaagcttaatcaaggacgtttttccagagcctgtctgaccaaccaagcccagtgtttgccctttttccaagctaaagtgaatatccgtcagtgtttcctcattttcaaaggcaaagctatcaatatcatactgcaagcgcccgtttacaatgccatctaaaggaaactcaggatcttgtacaggtgattcctgagacaagagttcctcaatccgctggtaggaaaccttccctcgctgagtgatattaaagaggaaaccgatagccataagaggccaaaccagcatatccaagtagctgataaaggtaaccagatttccaaccgtgattttcccttcctgaaccatcaaggaaccgaccaaaagcgttaaaacataggaggagccaacaaacaagagaaccatggggtcaaagagactatcgtatttcatggtttgcaggttcttttggaaggtcaattcattgactgcctgaaaagactccagctcgtctgcctgataaccgaaagatttggtcactttgatacctgatacagactcctgcaccttgttattgagttcagaaaaggcagcttgggactctccaaaggctctgtgagtctttctacctagacgactggtcgcataggccatgaaaggcaggggaagaatggcaaccaaggtcatttgccatgaaatgctaaagagcatggtcaacaaggtcactaaagctgtgattgaggcatccaccgctgacataacccctccccctgccagacgcgttaaggcattgatatcgttggttgcgtgtgccatcaggtcccccgtcctataggtttgataaaaggctggagacatttttgtgaaatgctcaaataagcgagagcgcataatctgtcccaaacggtaggaagtaccgaggatatacatacgccaaacatagcgcagatagtacatcccaaaggcagcaagtagcaagtaaaataggtcaagaaggaggtcctgctgggttaattgtcccgatgtgatggcatcaatgacccgccccatgaccataggtggaatgagattgaggacggaaaccaagaccagggccacaattccgactagataacggcgtttttctaacttgaaaaaccaccaaagtttttgaataatggacataaaatccctttctgattgcaaatgaaaacctgaggccaatactcaatgaaaatcaaagagcaaactaggaaactagccgcaggctgtactcgagtacggcaaggcgacgttgacgcagtttgaatttgattttcgaagagtacaagaccccaggtttttcttattcataggttacgactgtgaccgcacccttgtcatactcagcgataaagatattggctacattgtcatgtccttgtttgctgaggttatcaagcagccattcttcgttacgaccaatcgactccaaaacatcgacttgtatcacaccgtcagtcacaactggatacttaggattttcatcccccatttggaccacgatgagttggccattttgctcctgcacagctcgtttgacttgcttcatctggaaaattccttggctacgaagtttgagggctacttccgatgcagacaagccaactgaacgacaggcttctgggtcaatctgcccatttttgataaggagagttggttttccatcaatcaagcgtttgacaaaacgaacattgttattgagccacttgagggtcaagaccaaaatcgtccacatcatcaaaatcactgcatactggagaatgctgatagaactattgtaaatcaccccaccgatgataccaccgagaacatagttctgaatttggtctgtcgcagagttaggtgctaggttcccctttcctgtcacattgataacaaaaacaagcgagaagagccccaaggccagtttgattaaaatttccatataattgagtgtcatttgtttacctccaccaattcaatagcgtctgtttgattcaattctaatttctctaaaagatacttgtctggttggctcccgttcatggcgcggtagaaatttggacctaccttgacaagcgctccatcagtggctgcagaagtattgacataaacttctgatttatccactcccaagtctttggaaacaacctctatgaaatgaagggaggtttgaaattggttgttagaggcttgattggtctggtattttgagattgtcaccaaaagcatggccaccaaggtcaaggccaaaatcatgaccaattcccgaaacttagtcccctttttatctcgataggcttttaaagcaaaaaatcctgtgatagctaggagaacaattccaaagccaatcatgatgccattttgctgactgatttggctaagtacatagtcatatgagtaaaatttcatttattttcactccctttcataaaatcattcttaattataaacgaaagagagtgatttttcaagccatacgttggggaaatggacctttttttggtataataaaatctataatctgaatgaaaaaggtaactttatgaaactcatctcatggaatattgattccctcaatgctgccctaactagtgactcaactcgtgccaaattgtcccaagaagtactacaaaccttggtcgctgaaaatgctgatatcatcgctatccaagaaaccaagctttctgccaaggggcctacaaagaaacacttggaaattttagaagaactcttcccagactacgaaaacaagtggcgctcttcccaagagcctgcccgtaaaggctatgctggaaccatgttcctttacaagaaagaactcacacccactgtcacttttccagaaatcggtgccccttctaccatggacttggaaggccgcatcatcactttggaatttgataaatttttcgtgacccaagtttacactccaaacactggcgacggtctcaaacgcttggaagaacgccagatctgggatgtcaaatatgcggagtacttggctgaactagacaaagaaaaaccagtccttgcatccggtgactacaatgtggcccacaatgaaatcgaccttgcaaatcctgctagcaaccgccgttcaccaggatttaccgacgaggaacgtgctggatttaccaaccttttagcaactggatttactgataccttccgccacattcacggcgatgtcccagaacgctacacttggtgggcacaacgcagcaagacttctaaaatcaacaatacaggctggagaatcgactactggctcacaagtaaccgcatcgctgacaaggtgaccaagtccgatatgatcgactctggagctcgccaagaccatacaccgattgtcttggagattgaactctaaggagaaaacgaatggactatcaagctgtcattcctgaatttgtagtatctgacatcgaaaaatcacgccacttctactgcgacttgctgggattttctgtcgaatacaagcgtccagaggagaaatttctcttcctctcgcttgaagactgccaacttatgctagaagaaggcagcacagaagaattagcccaactaacctatcctttcgggcgcggtgtcaatatttcctttggcattgaagatgtccctcagctccaccaaaaactgctggaagctgactatcctatccatcgtccgctgaccaaaagagaatttcgagtgggagatagctttatttaccctcatgaatttgcgattttggatccagatggctattttttaagatttagcgagtagaataataaagattgggaaaaagtctttaaagttaaaaaggcatattatcaagtcttgagaaatcttgataatatgccttttatgatagaaaagccttctaaatgttagccaataagttgatttttgcccgtttttattatatttgttcgttttttatttcaaaacattaacaaaacatttgatttctaaagttatttagtgtaaaataaaaacattggctcaagcctattttaaattaaatatcgttttacttgtttatgtcgtgaattggcacgacgtttctacaaggtgccggaacacctaacaataagtaagtcagagtgaggtatgggtgttttgccatgcctattttggggacttacttagagattaagtaggccccttttgaatatttttaatatttcccttaattagtgtggacgggagcaacttccttcggaatttcatccctaatttttgagccaaaagtctcaaaaattccgtcatagacaataacaaacttattgtctatgataccactacaacaggaaatatttgataagactcgcttcgctcgtactagttttatcaaatatatagtactagcaaactggatcaccatagaaacatttaaccaacaagtaaactggcttttagactttaggaggtcttatgaaattattagaagagcgcatcctcaaggatgggcatatcttgggtgacaacatcctcaaggtggattcctttttaacccaccaagttgactttagcttgatgagagagattggtaaggtttttgcggaaaaatttgcttctgctggcattaccaaggtcgtaaccattgaagcgtcaggtattgccccagccatttttacagcggaatccttaaacgttcccatgattttcgccaaaaaagctaagaacatcactatgaacgaaggaatcttaactgccgaagtttactcctttaccaagcaggtaaccagcaccgtttctatcgctggcaaatttctctcaccagaggacaaggtcttgattattgacgattttcttgctaatggccaagctgccaaaggcttgattcaaatcatcgaacaggctggagcaacagtcgaagctatcggtattgtgattgaaaaatctttccaagatggccgtgatttgcttgaaaaagcaggctatcctgtcctatcactcgctcgtttggatcgttttgaaaatggtcaagttatttttaaggaggcagatctctaatgcaaactcaagaaaaacattcgcaagcagccgttcttggcttgcaacacttactagccatgtactcagggtccattctggttcctatcatgattgcgacagcccttggctattcgactgagcagttgacctacctgatttccacagatatcttcatgtgtggtgtggcaaccttcctccaactccaactcaacaaatactttgggattggacttccagtcgttcttggagttgccttccagtcggtagctcccttgattatgattgggcaaagccatggtagtggtgctatgtttggtgcccttatcgcatcagggatttacgtggttcttgtttcaggcatcttctcaaaagtggccaatctcttcccatctatcgtaacaggatctgttattaccacgattggtttaaccttgattcctgttgctattggaaatatgggaaataacgttccagaaccaactggtcaaagtctcttgcttgcagctatcactgttctgattatcctcttgatcaacatctttaccaaaggatttatcaagtctatctctattttgattggtttggttgttggaactgccattgctgccagcatgggcttggttgatttctctcctgttgcggcagcaccacttgtccatgtcccaactccactctactttgggatgccaacctttgaaatctcatctattatcatgatgtgtatcatcgcaacggtttctatggttgagtcaactggtgtttacctagccttgtctgatatcacgaaagatccaatcgatagcacacgccttcgcaacggttaccgcgcagaaggtttggccgttcttctcggaggaatctttaacaccttcccttacacaggattttcacaaaacgttggtttggttaaattgtcaggtatcaagactcgcctaccaatctactacgcagctggtttcctggttctccttggactccttcctaagtttggcgcccttgcccaaatcattccaaaccctgtcctcggtggtgccatgctggtgatgtttggttttgtatctattcaagggatgcaaatcctcgctcgtgttgactttgctaacaatgaacataactttcttatcgcagcagtatccatagctgcaggtgtcggactcaacaacagtaatctctttgtcagcatgccgacagccttccaaatgttcttctcaaacggaatcgtcgtagccagcctactcgccattgccctcaatgctgtattaaatcataaaaagaaataagaaaaagaggtgtagacctcttttttctatatccttacctgtctttcttctgacctctggcctgtgacaaacatggtaaaggttgctttgcagacatttctgccttcttgattggtgatatccacatccaccacacaggttgtgcgaccttgatggacacattctcctttaatagtcagcacatcatcaagttttcctgctttgaggtagttgatagaggattggagcgtcactccgtctaatcctagcgagataaccaccaaaccactgatctggtcacaaagggtaaagagatagccaccatgagcattgccatagtagttgagcgacgagtccactactttggtcgtcaccacaacgtgaccatctctcatttgttcaatttcgtaattttcaaaggcagatatagcgtcaaaatgaaaatctttcatcgtttcctcctgatatttcaaacgacactatgatactactttttataggactgtgcaaggagaaagctcctagtctggcaaaattccgacctgctccacaaatcgcataaaggccgcctgtccttgttctgtctgcttgtagactcctgcatcctcaagtacacgcgcaaagatagtacccacagagtccttgacgatttcaagggctttttctttatccgttagatctggatggtgggctctgagttggtctgcccattcctgatgataatcggcaactgtaacagcttctcctacaagatagctagcaacttgctccacttcttctttcagacgtggtggcaggattgccaagcccatgacctcaatcaaaccgatattttccttcttgatatgttggacatccttgtggggatgatagataccatcaggatgctctggcgatgtttgattatctcgtaaaaccaagtccaactcaaactgtccatcgcgtttacgcgcaatcggtgtgatggtgtgatgcggtgtcccatcagtctcagctaaaatctgcacactaggatctgaatactgacgccattcctgtaaaatcttgtcagccaagttgatcaaatcctctttggaatccgaagtcaaacgcaacactgacataggccacttgacaattccagccttgacctgctcaaaaccagcaaatcggaaagacttttgcaagggagccaattccataggaaatacgtgacgacctccttgatagtgatcatgagttagaatagagccccccacaatcggcaagtcggcattagatccagcaaaatatcctggaaactgctctacgatagccaacagacgttcaaaactctgacgactaatggccatgggacgatgctggccatctaagaaaatacagtgctcattaaagtaagcatagggcgaatactggaagccccactcctgaccaaccatttcaaaacggataatacggtggttactgcgagctgggtggttgacccgaccatggtagccctcattctctagacaaagctgacactgaggataattactaacttgcaccaacttggctgccgcaatctctttgggatccttttcaggcttagagaggttgatggtaatttcaagttcaccgtaatcagatggaacacgataagcaatatttttagcaatggccttgagtttgatgtagtcatttttctgactgagttggtaaaaatcctctatcgattgctcaggagagtgggcataggtttcccagaagtcacgattgacctgactcggacaaggagtcaccaagtccatcagttcagcaccaaggatttcacgtgcagtctgactatcctcaatcatctctaatcgaacggcttcctcaaccagctggtccttgaggtcaatcactttatccagatccgtctcaacttccaaaacaccgtctcccactcgtgccaagacacgattggtcaggtagattcgatccatttcctcaaatgaactttcagaaatgacatgtgttacaaatttatctactaaggtcactatagagcctccttttaactagtcaaggacgcgagtgccacctgcaacttcagcgatatagaagcttggagcgtagccaactacttcctcgtagtgtttgcctacagcttccttaaaagcctcaacagtatctttttgaaccaaggcaatggcacatccaccaaaacctgcccctgtcatacgagcaccgagaacaccttcttgtgtccaagctgtgtgaacaagagtatccaattccaaaccagttacttcatagtcatgctccagagaaacgtgtgacgcattcatcaaacgaccaaatgtttccaaatctcctgcttgaagggctacttgagctttgagggtacgttggttttcaagcacagcatggcgagcacgtttcaaacgattttcatctttaatcagatagctgtattggtcaaaggcccactcatccaattcacccaaggtctgaatatctaaagcaacttgcaattcttccactgctttttcacactcagcacgacgttcattgtatttagaatccgccaattcacggcgtttgttagtgttcataataacaacgacattgtccttcaaatcaagtggtaccaaatcatactctaaagtgttagtatctaagtaaatagcacgttggtctgcacccataccgatagcaaactggtccataatgccagagttgactccgataaagttgttttctgtttgttttccgattttaaccaaatcgagacgctctaattttaaatcaaagagatgctctgccacgacccctgtcaaaagttccaaggatgctgaagaagacaaaccagcaccatttgggatattcccataaacaaagaaatcaaaacctttgtcaatcacatgaccagcttcttgcaagaaatgaagaaccccttttggataattggtccaattgtgctctttttcaaacttgaggtcagcgagaggcacttcgataatgcccttgtcctcaaaattagctgagtagaaacgtaaaacttggtcgtcacgcttacgagctgcaccgtaagttcccaaggaaatagcagctggaaaaacgtgcccaccgttgtagtccgtgtgttcaccaatcaaattgatacgacctggtgaaaagaaagtttggtctgcttcttgatcaaaaacagcaagaaagtctttgcgaagtgcttctgcagtaagatgttgtgtcatttgaattctcctttgactgtccgttaagccaccttaacatgtaatcgttttcttctattgtatccaagggattttccaaggtcaatcctttttactaaaattttactaaactatcagtaaaaagcagaaaaatatgatatactaaccttaaagaaggaggatttatggctaccttaaaagacattgcacagctagcctctgtctctatcgcgaccgtatcccgcgtcctcaatcgcgaccagagcctatctgttacagaagaaaccagacaccgtattttaaccgttgctgaagaactgggctacaccaagcacctcaagacaggcgattcccacaaacccaagcaaaagattgccattatccaatgggtcagtgaacaaggagaactggacgacctttactactaccagattcgcttgggtattgaaaaaagagcccaagagttggactatgatatcttgcgctattttaatgaccatccttttaccctaagcgaggaagtgattgggattctctgcatcggaaagtttagtcgagctcagatttctgcctttgaagaataccaaaagcctcttgtatttctagacagcgatacactttccctgggacatacctgcattatcacagacttttacactgccatgaaacaggttgtcgattattttctcagccaagggatggaccgcatcgggattctaacaggccttgaagaaacaaccgaccaagaagaaatcattgaggataagcgactggaaaattttagaaactacagtcaaacaaaaggaatctatcatgatgaattagtctttcaaggaagctttaccgcccagtctggctatgacttgatgaaggaggccattcagaacttgggagaccaactcccaccagccttttttgcagctagcgatagtttagccatcggtgccctccgtgcgctccaagaagctggaatcaacctgccagaccgcgtcagtcttatttcctttaacgatactagcctgaccaagcaagtctatcctcccctctctagcatcaccgtctataccgaagaaatgggccgagcaggtatggatattcttaataaggaagtactccacggtcggaaaatccctagcctaaccatgctgggaaccagactgacattgagagagagtactctgccataactccacaaattaaaaatgacaaaaaatcctaatagagagtctcaaatctccattaggattttcttttttaggccatcacaatcatagacttaatggtcttacgttcatccatatctttataagcttgatcaatatcttctaatttatagcttgaagtaaagacacggcctggattgatatcaccatcaaggacggcttttagtaaaaattgcttatcatatgttgtcgcagaagctgccccacctgctacagagatattttgcataaatgtcgaaccaagagcacgattattatagtgtgggactcctacaaatcccatacgccctccattatgaaggacacctagcgcctgttctacagcagcctccgtaccaacacattcaagtgctgcgtctgctccgccaccgagaatttcacgcaccttggcaataccttcttgacctcgctcagctacaacagctgtcgcacccgactccagagccatcttttgacgatcttcatgacgactcataaggataatttgcgatgcaccacgcatcttcgccgcgatgacagcacattgaccaacagcaccatcaccgataacaacaaccttgttccctttttgaacatttgcaactcgcgccgcatgatagcctgtcggcataacatctgcaagagtcaagagggactttagcataccttctgtgtagtcagaaggttgtccagggattttaaccagcgcccagtttgcatagtgaaaacgaatatattccgcctgaaaatcgcctcccaagttattaccaatatgattgtcgcaagaaccgtcaaaaccagcaagacaggcatcacattcaccacatccatgagtaaaagggacaatgacaaaatcacctggtttcaccgtcgtaatggattccccagtttcttcgacaatcccaatcgcttcgtgtccactatttttgtgtccagctttcgtttctggattacggtacctccatagatccgatccgcaaacgcacgcacgaactacacgaataatcgcatcatctgcgtctataatttgcggacgttcaattgtagcaagaccaacctgacctgcctttgtatatactgctgatttcatttaaatttttccttccttgtaaagtttaattttgagatttaagcgatttaaagccacctgtaactgagacaagcgctcctctaattttttcttttcctcttctaaaataccaagccttttctctcgcgtttcatcccccttttggtagagagacatatagtcaactaaactatctacagagacacctgccgaacgaaaacacttaataaattccagagcttcaatatcatgatcttgaaaatcacgaattccagttgcagttcgagtaatcggtggcacaagaccaacccgttcatagtaccgaatcgtatccgctgaaattcccaacaagtcactagcagatttaatattcatacactaacctcctctcattcactgaatttaagctattctaactcacttatcttattatataattttgagttgactccaagtcaagcattttgcgtctaatcgaaaaattttttatcattatcagttctcttattagcataccttttcatcaatcaaagaaagaggttggggaaagcgtctttcaaatatgataccaaagaaactggaaaaaaagtctttaaaagcaaaaagcgcatagtatcagacattgaaaacccttgatactatacgtttttttgtatgaagatttacttcattttctcttgaaattgagttttgtctcagccgctttttctagtgttgatgcccatgggattgccctaaggctgttacctttcgcttatgttgcgcatgattgctttgactggtgtccacttcgatagtaatattctgcacacctctttcttctaagagctgacgtacttgattctttgtttccgtcatctcctcccaatcctctaaacagatatggataatagcattattttctagaccatccatggaccaaatgctaagttgattgacacttttgacattggtcagagcctccaaatccttctccaaatcacctgtctctagtccttctggcacagcatccaggaaaatcttgagtgcgctccaaaatcgaggaatagcttttgttagaatgaagatggaaatgacaagcgataagagcggatcaaggatataccaatctgtaaatcggaggataatcgccattagaatgacagccaaccaacctagagtatcttccaaaaagtgcaggctcagaattgactcgttctttgtctttcccttacgaactactagactagctagcacattgatactgactgcaatgattcctagccagaggacgccttcgtcattaacgggctgtggattcaaaagtttagttatattttccaagatcactagaatggatcctgtgataagaatcacagcagtcactagggcccctaaaagactaaatcgcttgtaacccaaggtgtattgcctatcttcttctctatttgagattgtttctaaaaaggccgatatgccgattgctatagcatctcccaagtcatggatagaatcagcaagaacagcacttgaaccgaagattcctcctgcgataaactcaacaatagcatagcttaaatttaagaaaaaagctacccaaacagtatattttgccttcatctttctcattcctttgttataatagatttatgaataccttgttcattatcattatccactaaaactcaaagaaaggatagaagcaaaacgtcagctttattcatttctgaacaatttgcctcaagtgtccatatgactaccattgaccgccgtatcagcaaaacaaaaaaagccatctatcaagcttttctacaacttttaaacgataagggttacgaagccactacagttcaggatatcattgatctcgcagatgtgggacgatccaccttttactgtcactatgagagtaaggaactacttctggacgcgctttgccgccacctcttccatcatctctttgaaagagagcaacccatttcaactgaggactacctcgcccacctctttctccattttcagaaaaaccaagaccatatcaccagtttactattctccaagaatgactacttcctccgtcaactccggagagagctggagcaccacgtctatcccatgctaactgatgagtttaaagaagcacacccaagtctgcctgcttcttacctccaacacttagtcgtgtccaactttatcgagacattgacctggtggctcaaaaaaggacaagactttacagaccaagaagttgtgcagttttatctagaccttctcattcctaaaaattgaatacagattaaagctcggttgccttatttctaggctactgagttttttatcttttcaataatcaaaaaagcccagacgacattgtctgagcgttcttctatattgtcgtttaaccaagttgagtttagcttttcaggctatttcttcaacaaaccttgttcttgtagaaactccttggctacttgctctgctgacttgccttcaacaccgacttggtagttgagctggctcatctggctttcagtaattttaccagccagtttattgagaactgtttccaactctggatgtttcttgagaagagcttctttcatcagtggagctccttgataaggtgggaagagttgtttgtcatcttctaagacctgtaaatcataacgtgccaattctgcatcagtcgaataggcatccgtgatttgaatgtcacctgactgaattgcctgataacgaagagctggctccatagtcgctacattgagattgagaccatacattgactgcaagcccttatttccatcttcacggtcgttaaactcaagtgtaaagcctgccttcagctgcccttccacttttttcaagtccgaaatggtcttcaagccatattcttgagcaatttttttcggaacagctacagcataggtattttgataagacattggtttgagataggctagatgatcctgtttggcaataccatcacgcgccacctgataaacctgctctggctcatgactcactttaggtgatggctgaagtaaactttcagtcaccgtaccggtaaattcaggataaatatcaatatcaccttttttcagagcttcatagaggaagcttgttttcccaaaattcggtttaacagtcgcagtcatactggtattttcttcaattagcaacttatacatattggccaaaatttctggttctggacccaatttcccagcaatgatcaagttctctttctctttttgagctaagagggctggactataagacaaaccgagtaatatggtcaccaaggcaaaaccagaaaaaatcgtccgcaattttgctttttccatcacttttagtaggaagttaaaggcaatagcaagcactgcagaagaaagtgccccgatcaaaatcagactggcattattacggtcaattcccaaaaggataaaggaacccagcccccctgcaccaatcaaggccgccaaggttgccgtaccgataattaagacagctgccgtcctaatcccagacatcataacaggcatggcaagtggaatttcaaacttcttgagtcgctcccacctagtcatcccaaaggcaattccagcctcttgcagactcggatcaattccctttagcccagtgatggtattttgcaaaatcggaaaaatcgcataaatcactagagctgtcaaagcaggcaaggtcccaattcccatcaaggggataaagagtcctaacaaggccagagacgggatggtctggaaaatccctgcaatctgcaaaacccaatccgccaacttctcatgatagcgaagataaacagccaagggaatcgctataaagatggccagcaacaaggtcaaaagtgacaactgcaaatgttgagatagagctgtcaaccaatcactaaaacgatcctgaaaagttgcaattaaattagtcatgaacactacctccaaacaagtctgctacaaaatctgttgcaggagcttttaaaatcgtctcgggattcgccacctgacgaatctctccatcctgcaagacagcaatacggtccgccaatttcaaagcttcatccgtatcatgggtcacaaaaatcgttgtcatcccaaactctttatgcaattctttagtcagaacctgcaactgtttgcgagaaatagcatcaagagccgaaaaaggttcatccatgaggagaatcttaggctgaccaatcatagcccgtacaattccaacacgctgctgttctccaccagataattcattaggaagtcgatgtccatactcagccactggtaaaccaaccttagccaaaagctcttctgttttctgagcaatttcttccttagtccagcccttcatctcaggaatcagggcaatattttccgcaactgttaaattgggaaacagagcaatagcctgtaaaacataaccagtagaaagacgaagttcacgctcatcatagtctttgatgcgtttaccatccatataaatatttccatcagtcggttccaaaagacggttaatcatcttgatcatggtcgtcttacctgacccagaaggtccaactaaaaccataaactccccattcttaatccgtaaattaacatctctcaaaacatctttttctgtgtagcgcaagactacatttttgtattcaatcattctttgtcctcattttaaaactttcctcgattggtcaagtcttctaccttaggcataacttccttattatcccaatgctccacaattttcccgttttctagtcggaagctatcgtactgggcataggcaactccaccaatctgattctgaccatagctaaccacatagtttccttgtcctaagagttggaaaacaaagtcaaaagtggcctttacttataaacagctaatttgctccattttaaacctcattttcctcctctttcagattaaccaaaattctttcttgaaaggcttcaaactgacgaatttcttcctcggtgaatcctttataaaagatcgtatccaatttctgactgacacgatgccccacttctttctgagactgccccaactctgttaaaaccaaatacttcttacgcttatcttctccacatggactaatagttacaagattttgttcctctagttttttaatcatcgtcgtcagagtattattagcaagcccagtcgcaagcgcaatatctgtcgcagttgcgcagccagtttcactattccataaaaccgctaaaatcttcccctgttcactccgataaagagcatcaggatcttggctcagtaacttttgaaaaagccgcccattcaacaaacgaatatgatgagctagcaaatgactatctttcatgacacctccaatttatttccatatcgaaacgaataaaacaattgtaacactcatcgttccaactgtcaactatttcgatttagaaataatttttcccagtaaaaaaatctcctacccaaggtagaagatttcaatcttataaaacttaatccgtcatgtctgataccaacgttcgatgctccaatggaacactgcacataactagcaagaaaatgaaacctgactgaatccagaagagggccaagtcaaagattccgtgcacagcaaccactgtaaggaaagatagataaagaccgataatcgggcgtttccccgactcctgactcatatccatcatcaagcgaacaggagccacagaagacaaaactagtaaaatagtccctacaattccgtaactcagaatcgtatcaatataaagactgtgagcatgttcatgataaggagcatttatccgaggatacgagtgcatgtaggtcaatggcccttcaccccaaaaaggattttgcttaaacaaggccatcccagcatcccagatagaaatgcgttcttccatagaagagtctaaagtccccatccgaactcccaaatcactagaaaagaggaagctcaagccaatcgcaaagaccccaatactaagccaaaaggccttccagtttttaatggtcgtaaagagatagataatggcaccagcgataatagcaggaaaggcagttcgattttgcgtaaagttcaaaccaaagagattcacaaagcctgcaatcacacagaatactttcaaccaattcaacttggtcgttgtaaacagatagaaggcaatcatgatacagaaacaacaaataattccataataattaggattaaagaaggtcacttctgcacgattctgatgccacacctgcatgttaggtgaaagaaaagcatagttgaatttcttcacaatttggaaatgttctaaactcgcaaaagcagctgacaaaacgctaccaaacaagacgagctgcaaaatcaatcgaaagaatttatgtgataaaatcgactgataatgcaaaaagaaaacagtaaatagaaaaattcctactgaggccacaactcccatccaattttgtgcaaaaacggatataacagtactatagccaagaaaaagaagtagcatcggatgctcccccattttctgaagaatacttttcatgtctcctgtgaaaattaaactgataatatataaacagaatacaactacaaaaagataaaagggtaaaaagatactcaggataattcccaataaaatcagctctttactagacaaccctttcagcttttcaataaagcctattgatttcaaaatgaatcctttctctccaaatcagttgattcagataatagtaagctaccctttattgtaccacttttttagcaatttgaaaacaaaggaaacgttttctaaaataaaaaccctattttatcaaccatatcaagtcttcaaaatgttacttcaattccgttctcaattactcgataagtctgattttgcaaatcaatttctgctactgctgttacggacttatctttattttgacgtttgattacaatgctgtgggctgttggtgtttcaacgtcaatagttccttctaaatcaaatgctactgatcgattacggaaagaaaatagattgagaagggccttcactacaggacgttggacttcttctgctatttcctcattgctatagtaatgacgattaatatttcgacctactttagtttcttctaataatttcaaatcattcttgcctgctaatagacctacatagtaaacttgaggaatacctggagcaaatgcttgaattaatcgtgcaaggaaatacttgacatcatcatctccaagcgcagaataataggttgaattgatttggtagatatctaaattattatactcggcactggagtacttacgtttgacattagctccaaccttatagagttcatttgaagcatagtcaatctcctcatctgtcaagatatccttgacatccaccactccaatcccatcatgggtgtctagcgtcgtaaattgcttcattgggctcatctttaaccacttagccaaacgctctgttctggaactgtaaagagtataaagtgtcaccattggaagagcaaaatcataaacatagtaatcatggtctgctattttaaactgaatcgaataatgttcatgaatctcaggtaagagctctgtcccatactcagcagcgatatctcgaactttgtccaataaatcccaaatatctggttctacaaagaaatcattagtatccaatttcttcactgcataagcaaaggcgtctagacgaatcaaatcacacccattacttgccaagtgctgaatggtcttacggataaattccatagttacttctttggtcacatcaagatcaatctgctcctcaccaaaggtattccacaaatgttcgactgacccatcttcaaaaacaatctcttgctttggtgcacgatccttacgcttgtaaattaaatctacatcagactgtgtcggacggttttctggccaaaacttatcccagtttaaaaagagatctttaaattcactggcttcatgtttttcttgatagtccttataatacttagattgacgagaaatatgattaatcataaagtcaaacataagataatatttctcacctaaacgcttaacatcctcccaatcaccaaaagctgaatccacttcgtcgtagtcaactggcgcaaatccacgatcacctgttgatgggaaaaatggtagaaggtgaactcccccaatagcatctccaaaatactcttccaaattctcatataagtctttaagattatttcccagactatctgaataggtaatcaacatggttttattctgaattggcatcattactctcctttttctaattgaagccaagtcttatatgacttggcttcgtaaatcaagttcatgttatactcttcgaaaatctcttcaaatcacgtcagctttatctgcaacctcaaagctgtgctttgagcaacctgcggctagcttcctagtttgctctttgattttcattgagtattaaatctctgtttatcatcaaactcgtactaatatagactgtgataaactaagtactactttcttgttttctacatagaattatcaacaagctgaacccttcctctgtgtcaaagactatagattctatgagttcttcttacttcactgctccgttgctcatgcctgaaataatatgtttttggaagatgaggtagacgacagtaattgttacaattcctacaatataggatgcaaaacttggcccatagtcattaaaatactgaccttggtagttgtactggaagagaggcaaagtccacagcttggaatccttattcaaaattaacaatggcaacataaagtcattccagaaccataatgcattgataatcaaggttgtagcatgcatgggcttcagcattggaaaaataatccgacggtaagttgtaaatcgatcagccccatcaatttctgcagcttcatctaaactatctggtacactgattttaatataaccaacatacaagaagagagtctgtggaattgcataagttagataaagtagtaccaacccccacatatttgccaggccgagtttgctcatcataactgtgataggaatcataatcacctgaaatggaacaaatatccctaaaatcaatagtgaatacataattgcaaaggcttttttcttggacatatttcgagcaatggaataggctgcagctggtataaagaaggctactacaatcaatgataacaccgtaataacagctgaattccagaaatagcctccaatcccatccgaaaccaatcgttcataattgcttaatgtaaaaggattgggcaaaccaaagaaatgattcatgatatccttggttgtcttgaaggaactaaaaaccgttaccaacaaaggaacaagtatgagaataccacctactatcaagagaacatacttccaaaactgattcaatttttcttcttttttcatgtgtaagactcccctattagatttcaaatttctttgatagtttgatttggataagagaaacaattccaataattaagaataaaatcaaggcaattgcattcgcatatccatattgattactcttgaaggcatagttatagactaaaagaccaagagacgttgtagcattattaggaccaccactcgtcaaagcaaaaatttggtcaaaggcagtcaaaccggacttaagagctaggataaaaaccatagaaatcgttggcaacaaatatggtaattcaatcttccaaaaagtttgtttgcttgttgcaccatcaattgatgccgcctccaaaatatcagatggaatactctgaagaccagcaagaaagagaataattggcattgctactccttgccatagaagaacaaaaatagttgctactaccgcaccgatcggtgttcctaatagactttcttgtaaaaaactaatccctaaaatttttccaatcgttggaagaccatagttgaagaattgtttaaaaatcaaggaaactgtcaaaccagacaaaaccgccgggaaaaagaaccatgctctaaagaaggtctgccctttcatcttagaatttaaggctcgagcgacaaccatcccaattgtaatctctccaataatcaatgccagggttaaaatcaaagtaaaagcaatggctgtgaagaatttcccatcaatcatcagcaatttatagttattcagaccaacaaatttataattataggtcaatccagtccagttagtcaaactatagaaagcaccttgtaccatcggaaagtaaaagaagatagcttgtaatgcaagcgggatgagcaaaaaagtccaaccccagtatttatttaaaatttttcgaatagccatatcatcttaactcctattctagtccaaatctgccttcattggattaaagaaagcattgagattgtttgccatatttttcagatttttatccatcaagtaacctgcacttagattgaaaaaatcttcttcagaattccagtgttggcccaaccaaacataatgtttatccgtaaatgctagtttagaaatctctgcaagtgctgaatcttctttttcctgtatacctttcacagcaactggtgaaccatctacatcataatatgcctgcatagcttttggactagtcatatagctgataaattcttcggtttctttaggatgtttggtcgtagctgaagttgataatgccatgtcccctgcaccaacagtgacttcttttcctacttcttctcctgggaaggcaaacatccccacatcaaattttggatcctgttgattaattgccgctaatgcccatgatccttgtggcatcataaaagctttttcattcgagaatgctaccaccgcatcattataagaggcaccacgccatccatcttgagcattgtctgccaacaaatctagtcgttctgcatctgcttttaaaatagcatcatctacagaaatagcatttggttttgaaaagcgaagatagttattagctgcgtctccactgcctgtaatggtaatgagagaaagttggtgataaccgtttaatgtccatccttcattgcctgcaactgcaaacggagaattcccactatcttttatctttttaacaatctcttgaaactctttaaaagtcttcggttcctcaagtcctaattctttaaactttgttttattgtaatagattccataaaggttagcagttaaaggcacactataaatcttgttattgattgcatacttttctgcatagtcattcttaatattctcaagataagatttccctgtcatatctgcaaagtaacctgcttttgcccactcctgaaaatccatattttgaggatagatattaacaatatctggaacatctcctgataaaatccgagtcttcagaacaataccagctgccggaacagtcgtcagttttacatcaatagtaggatgatccttttcaaaattatctacaattttttgcaaagtatccgccatttcggtcttctggttaaaaaattcaatcgttacctttccatcagtcgattgattattctgaccacaagctgctagacctagtaaactagccccagcgactaaaagaaaacctgctttcttataccatttcattggaaagcctcctttataaatttatacacctttattatagtcttctaaaaatatactgtctactcaaaaaatctccttgggataagataacagttaagcctgcatacatgagttctgcacctgagtaaacttctccattttcctgtaattcatacagtccctcttcatccaaatcttttaactttaaagttgtttccatggtctctacaactgacaaaacgcgaacgtaggttacaatcgtttgatttttgtaattaaattgtacagctgcttcattggatgcagactcgggattgattaacctatactgttgtcctaactgaactactggtcgtaattctttatacaagttcacctgattagcaatctcagctttctcttcatctgataaacttgtcaaatcaagctcatatcccaaatttcccatcattgctacatgaccacgtgtttctaatggtgtcgttcgccccatctgatgattcggtactgctgacacatgagcccccatagaaatggttggatagagataagatgaaccgtattgaattggtaaacgtgcaatagcatcagtattatcactagtccagacttgtgggaaatagcgcatcatacccagatcatttcgtccaccaccaccagagcaggactcaaagagaatatggctgtgcttctctgtcagataagaaacgagttcgtaaagccccaacatgtactgatgagattgcatctttgtctctagataagtaaagccatttcctaggttggtcatattacgattcatatcccatttaatataatcaatctcatgataagataggagttgatctaagacatttttcaagtattctactacctgaggattggcaagattaagtactaattgattccgagaataagtatgctcataaccaggaacctgaatagcccagtcaggatgtttacgatacaaatcactatctacagaaatcatttcaggttctaaccaaagtccaaactgcaaacctctttcatggatagctgaaatcagactttctaggcttccacccagttttttctcattaacaacccaatcacctaaagcacgattatcatcaaaacgattgccaaaccaaccatcatctaatacaaaaagttcaatgccaactttcttagcttcatcagctagctctaacagtttttctctctgaaagtcaaagtaagtagcttcccagttattaattagaattgggcgttcttttgtagaaaatttacttggcataatgtgcttcagtacaaaattctgacttgcatgactaacaccagttaatcccttgtctgaataggtcattaaagctaccggtgtttcaaagtattcctcagggtctaacttccaagaaaagttttccggattaatcccaatagccagccgaacttcattcaattgattcttttgaacaaaagcttcaaagtttccactatacattagttgaatagcaaacacattccctgcatcctctgtgattccttgatcacagagtagaagagctggtgtttgagcatgcccagaagctccacggttcgaactaattgaaaagattccttgttctacctgttgacgtcgaacagtcttttcacgagcataagcaccctgcagagttacgatttcgtaagctgccgctggaaaatcagccataaaagaaaagtctttatgaatgacaacttcctgattactattattcactaatttactgtagctagcaatagtcgaatcattatcaaaagcagtataatacaaattcagactaagttgagccttagaatcttctaacattaagacaagagtctctgtattatccatgctatgtggagaaggtaagccctgtggaccattctgtacctttttaaactttttgcttctacaaatcgaaagtctgttacttcagttacactatgctgaatctgtatagttggtttcctaaaatctcctaagccatgttgcccaaaaatatgacgttgagtatctaaactaaaggttcgattagtagctgttggatttcctgaaaaggcatggtcccgttcataaacactattggaacctttatagttcttaatagtctttcctaaatgtttcaaaagtaagtagccatttcgattttcaataatcaaacttagatttttactttcaacataaaatagattattctctatcctaactcccatttacttcacctcatcactttatagattatattttatcatctgaaaacgctttccgaaatagaaaaatgtctcaagaatatggtaaaatgttaggtaggaggtagcacatgctagttttttcagaataccagactggaacaattgacctttccctaagcttttatggatatgaggaatgcacaccaaattactcttttggtccaacaattcgagatacatacgtcctacattacattactaaaggacaaggaaaatttcattacaagggtaaaattgttgatttaaaagaaggagatttctttctattaaaaccagatgaactaaccttttatcaagcagatagtaaagaaccttgggcctactactggttaggaatcactggagggaaagctcctgattattttgctctttctcaaatttctgaccaatcttatctcatccaatctgaaacttgtcatacccagactactgcaaaactcatctcagacattgtccgcttcgctcagattaccaaatcaaatgaattagctcaactccatatcatgggacaactccatgaactgatgtttcatctgggaactattgctcccaatcagaagaaaaagaatatttcatcgacccaccaactctatcttgaatgcaaacgattaattgatagccactatcctcaatcacttacaattcaagatttagcaaaagaactatccgttcacagaagctacttatcaagcgtattcaaagaatttaacaccttatctccaaaagaatacctactatacgttcgaatgtatcgagctaaacaactcctcgaaaatacccaagagtcaatcaaggtaattgcgtactcggtaggcttttcagatccactacatttttcgaaagcttataaacaatactttaatcagactccaagtcaaacaagaaaagaatattctcaacaccaactagtgagaaaggaaacactatgaaatcataccaagccgtctaccaaattctagctaaagaaaccgattatatcagcggagaaaagattgcagaagaactatcactgacccgaacatcaatttggaaagccatcaagcgtttagaacaagaaggcattgaaattgatagtatcaaaaacaaaggctataaactggtgaatggggatcttattcttccggaactcctagaacaaaatcttccaattaaaatcagttttaaatccgaaacaagatcaactcaactcgatgcaaaagaagcaattgatttagggaatgaagcaaacactctctatctagcttcctatcaaacagctggccgaggccgttttcaacgttctttctactcaccccaaggtggcatttatatgacactccatctcaaaccaaatcttccctatgagaaattaccatcctacacactacttgtagcaggagctatctacaaagccattaagaacctaactttaatagatgtcgacataaaatgggtcaatgacatctacctcaaaaatcataaaattggaggaatcctcactgaggcaacgacatctgtagaaacaggcttagtcacagatatcattattggagtaggaatcaactttactattaaagacttccctcaagaattaaaagaaaaagctgctagtttatttaatgtaccagcacctattaccagaaatgaattaattatcgaaatatggcgcactttcttcgaaacaccagcagatgagttgttatacctatataaaaaacagtcatttgttcttggaaaagaagttacttttacactagatcaaaaagactacaaaggacttgctaaaaatatctctgaaaatggaaagcttttggtgcaatgtgataacggaaaagaaatctggctcaatagcggagaaatttcactcaagaattggaagtaataataaacgagaacaaccataaaatggctctataatatttgtagtgggtaaatcccctatagatattatggagccgtttttattgtagaaaaaaagtcccataagatctataatgaaaagcgaccaaaccatcattagaaagaatcctatggaacaattacattttatcacaaaactactagacattaaagaccctaatatccaatttatggatgtcatcaataggaatacccacaaagaaatcatcgctaaactggactatgaggccccatcttgccctgattgtggaaggcaaatgaagaaatatgactttcaaaaaccgtctaagatcccttacatagaaacgactggtatggctactagaattctacttagaaaacgtcgttttaagtgctatcagtgttcaaaaatgatggttgctgagactcctctagtaaagaaaaatcatcaaatccctcgtatcatcaaccaaaaaattgctcagaagctgattgaaaaaacttctatgaccgatattgcccatcagctggccatctcaacttcaactgtcattcgcaagctcaatgacttccgttttaagtctgatttttctcgtctgcctgagattatgtcttgggatgagtactcctttacaaagggaaaaatgagtttcattgcacaagattttgaaaagctcaatatcatcactgttctcgagggaagaacacaagctattattcgaaattactttcttaaatatgatagagtcgtccgatgtcgagtgaaaatcattactatggatatgtttagcccttactatgacttggctaaaaagctttttccaaacgctaaaatcgtgttggatcgtttccatattgtccaacacatgagccgtgctatgagtcgtatgcgtgtccaaatcatgaatcagtttcatcgaaaatcccatgaatacaaggctatcaagcgttactggaaactcatccaacaagatagtcggaaactcagctataaacgtttttatcgccctacttttcgcatgcacttgacgaataaagaaattctagacaagcttttgagctattcagaagacttgaaacaccactaccatctctatcaactcttgctttttcactttcagaataaggaaccggataaatttttcgggctcattgaggacaatctaaagcaggttcatcctctttttcagactgtctttaaaaccttcctcaaggataaagagaaaattgccaacgcccttcaactaccctattccaacgccaaactggaagccaccaataatcttatcaaacttatcaagcgcaatgcctttggatttcggaactttgaaaacttcaaaaaacggatttttatcgctctgaatatcaaaaaagaaaggacgaaatttgtcctttctagatattagcttttcttcaacccactacagttgacaaagagcccataaaatcaacaatatataaagattttagcttttctgcaacccactacagttgcaaagagcgcaaaaaaacttcagataagtaatccaattaagttttacaaatctgaagtttttattctactattcttaaaaatacaaaaaaagagttataaactctcaataaaacggagaataagggattcgaacccttgcgccagttacccgacctaacgatttagcaaaccgtcctcttcagcctcttgagtaattctcctattaatgggcacgagtggactcgaaccaccgacctcacgcttatcaggcgtgcgctctaaccacctgagctacgcgcccaagttaaaaacttggtaatttgaacaaagttcaaagcgggtgacgagaatcgaactcgcgacaacagcttggaaggctgtagttttaccactaaactacacccgcataaatactataaataaaaatggcgcgagacggaatcgaaccgccgacacatggagcttcaatccattgctctaccaactgagctaccgagccttattgcgggagcaggatttgaacctacgaccttcgggttatgagcccgacgagctacctagctgctccatcccgcgttaatacaaaaggaggatgtgggattcgaacccacgcacgcttttacacgcctgacggttttcaagaccgttcccttcagccggacttgggtaatcctccatactattcaaatggaccttgtaggacttgaacctacgaccactcggttatgagccgagagctctaaccagctgagctaaaggtccaacaagatctttatagcggcgaaggggatcgaacccccgacctcccgggtatgaaccggacgctctagccagctgagctacaccgccatatatcgggaagacaggattcgaacctgcgacaccttggtcccaaaccaagtactctaccaagctgagctacttcccgagttaaatagaaaaatgcaccctagaggagtcgaacctctaaccgcctgattcgtagtcaggtactctatccagttgagctaagggtgctcattatattatgccgaggaccggaatcgaaccggtacgatcgttaccaatcgcaggattttaagtcctgtgcgtctgccagttccgccaccccggcctctctaagcgaacgacgggattcgaacccgcgacccccaccttggcaaggtggtgttctaccactgaactacgttcgcactgttttcttctatctaaaaatgccggctacatgacttgaacacgcgaccctctgattacaaatcagatgctctaccaactgagctaagccggctcatttattatatcttaatgcgggttaagggacttgaacccccacgccgttaagcgccagatcctaaatctggtgcgtctgccaattccgccaaacccgcatatatgacccgtactgggctcgaaccagtgacccattgattaaaagtcaattgctctaccaactgagctaacgagtctaaaataacttacgttattctaacggtcccgacgggaatcgaacccgcgatcttcgccgtgacagggcgacgtgataaccgctacactacgggacctttgggagttaacgggatcgaaccgctgaccctctgcttgtaaggcagatgctctcccagctgagctaaactccctagagctaagcgacttccatatctcacagggggcaacccccaactacttccggcgttctagggcttaacttctgtgttcggcatgggtacaggtgtatctcctaggctatcgtcacttaactctgagtaatacctactcaaaattgaatatctattcaaaccaagaaaaccgttcgctttcatattctcagttactttggataagtcctcgagctattagtattagtccgctacatgtgtcgccacacttccacttctaacctatctacctgatcatctctcagggctcttactgatataaaatcatgggaaatctcatcttgaggtgggtttcacacttagatgctttcagcgtttatcccttccctacatagctacccagcgatgcctttggcaagacaactggtacaccagcggtaagtccactctggtcctctcgtactaggagcagatcctctcaaatttcctacgcccgcgacggatagggaccgaactgtctcacgacgttctgaacccagctcgcgtgccgctttaatgggcgaacagcccaacccttgggaccgactacagccccaggatgcgacgagccgacatcgaggtgccaaacctccccgtcgatgtgaactcttgggggagataagcctgttatccccagggtagcttttatccgttgagcgatggcccttccatacggaaccaccggatcactaagcccgactttcgtccctgctcgagttgtagctctcgcagtcaagctcccttatacctttacactctgcgaatgatttccaaccattctgagggaacctttgggcgcctccgttaccttttaggaggcgaccgccccagtcaaactgcccgtcagacactgtctccgatagggatcacctatctgggttagagtggccataacacaagggtagtatcccaacaacgtctccttcgaaactggcgtcccgatctcatagactcctacctatcctgtacatgtggtacagacactcaatatcaaactgcagtaaagctccatggggtctttccgtcctgtcgcgggtaacctgcatcttcacaggtactaaaatttcaccgagtctctcgttgagacagtgcccaaatcattacgcctttcgtgcgggtcggaacttacccgacaaggaatttcgctaccttaggaccgttatagttacggccgccgtttactggggcttcaattcataccttcgcttacgctaagcactcctcttaaccttccagcaccgggcaggcgtcaccccctatacatcatcttacgatttagcagagagctgtgtttttgataaacagttgcttgggcctattcactgcggctgacttaaagtcagcaccccttctcccgaagttacggggtcattttgccgagttccttaacgagagttctctcgctcacctgaggctactcgcctcgactacctgtgtcggtttgcggtacgggtagagtatgcttaaacgctagaagcttttcttggcagtgtgacgtcactaacttcgctactaaacttcgctccccatcacagctcaatgttacagatataagcatttgactcatatcacacctcactgcttagacagacacttccaatcgtctgctttagttagcctactgcgtccctccatcactacatactctagtacaggaatatcaacctgttgtccatcggatacacctttcggtctctccttaggtcccgactaacccagggcggacgagccttcccctggaaaccttagtcttacggtggacaggattctcacctgtctttcgctactcataccggcattctcacttctatgcgttccagcactcctcacggtacacnttcttcacacatagaacgctctcctaccatacctataaaggtatccacagcttcggtaaattgttttagccccggtacattttcggcgcagggtcactcgactagtgagctattacgcactctttgaatgaatagctgcttctaagctaacatcctagttgtctgtgcaaccccacatccttttccacttaacaattattttgggaccttagctggtggtctgggctgtttccctttcgactacggatcttagcactcgcagtctgactgccgaccataattcattggcattcggagtttatctgagattggtaatccgggatggacccctcacccaaacagtgctctacctccaagaatctctaatgtcgacgctagccctaaagctatttcggagagaaccagctatctccaagttcgtttggaatttctccgctacccacaagtcatccaagcacttttcaacgtgccctggttcggtcctccagtgcgtcttaccgcaccttcaacctgctcatgggtaggtcacatggtttcgggtctacgtcatgatactaatccgccctattcagactcggtttccctacggctccgtctcttcaacttaacctcgcatcataacgtaactcgccggttcattctacaaaaggcacgctctcacccattaacgggctcgaacttgttgtaggcacacggtttcaggttctatttcactcccctcccggggtgcttttcacctttccctcacggtactggttcactatcggtcactagggagtatttagggttgggagatggtcctcccagattccgacgggatttcacgtgtcccgccgtactcaggatactgctaggtacaaagactattttaaatacgaggctattactctctttggctgatcttcccaaatcattcttctataatctttgagtccacattgcagtcctacaaccccgaagagtaaactcttcggtttgccctcctgccgtttcgctcgccgctactaaggcaatcgcttttgctttctcttcctgcagctacttagatgtttcagttcactgcgtcttcctcctcacatccttaacagatgtgggtaacaggtagtacctgttgggttcccccattcggaaatccctggatcatcgcttacttacagctacccaaggcatatcgtcgtttgtcacgtccttcttcggctcctagtgccaaggcatccaccgtgcgcccttattaacttaaccttattttttgacctttcagtcataaactcttattaatactacagcgttttcggtttattttcttgttactatttgatatagatattcaattttcaatgtgcattacttggtgatctctcaccaatggagcctagcgggatcgaaccgctgacctcctgcgtgcaaagcaggcgctctcccagctgagctaaggccccacaagacctctcaagactaaacaagaccaatgcgcagttccttatcmwtagaaaggaggtgatccagccgcaccttccgatacggctaccttgttacgacttcaccccaatcatctatcccaccttaggcggctggctcctaaaaggttacctcaccgacttcgggtgttacaaactctcgtggtgtgacgggcggtgtgtacaaggcccgggaacgtattcaccgcggcgtgctgatccgcgattactagcgattccgacttcatgtaggcgagttgcagcctacaatccgaactgagactggctttaagagattagcttgccgtcaccggcttgcgactcgttgtaccagccattgtagcacgtgtgtagcccaggtcataaggggcatgatgatttgacgtcatccccaccttcctccggtttattaccggcagtctcgctagagtgcccaactaaatgatggcaactaacaataggggttgcgctcgttgcgggacttaacccaacatctcacgacacgagctgacgacaaccatgcaccacctgtcacctctgtcccgaaggaaaaatctatctctagagcggtcagaggga

SEQ ID NO: 68 - DNA, 75285 bp, Streptococcus mitis NCTC 12261 contig14
aacagcagaccgcgtcaagaacgctaaaaaactcatggataccgaaagttaccaagactatatgaaacgtgtacatggataaaaaagaagcctgatggaaacatcgggcttttgatmctcaatgaaaatcaaagagcaaactaggaagctagtcgcaggctgctcaaaacatggttttgaggttgtggatagaactgacgaagtcagctcaaaacactgttttgaggttgtagataagactgacgaagtcagtaacacatctacggcaaggcgaagctgacgtggtttgaagagattttcgaagagtatgacttgcaaaaagacttagcaaaccagctaagcctttttcttcttatctcgaacgttgttttccagcgttgcgatttttgtgttttttcttgcttgtgatagcagttggttgttcaggggtaacgtcttttcgtccacttggtgtagagaaagcacgtgcttttggtgggttcttggctagttcttcacggacttttttgcgaagttttggacggacgatatagttgacgataaactgttggagaatcatcatgaaaccaccgacaacccagtaaagtgtgacactggctggtgaaatgagggagaagacaacaatcgtgattgggctcacgtaagccattttcttgatttgttctctttgcgtttcgtcttctactccgtgaagtgaaaggagcgattgaagatagtaaaggacacctgcgcaggcaaccaaaatcatacttggagaacctagaggaatgcctaggtagcttgcttgagcaaccccttcagtatgttgggcagcaaagtagatagctgagaagaaaggcatttgaaggaggatagggaagcatcctacaccaccaaacatgctgatgccgtgctctttttgagcagcaaagagagcttgttgggcttcgagtttttcttcttgagtagtcgcttccttgagacgtgtttggtgtggctcaaggacgtgcttgagggcgttcatcttttcagagtgaagcgttgccttccatgattggtagataccaagtggcaagataatcaagcgcacgataatggttacgataatgatagccataccaaagcctagaccttgatcagtagcgaagtacttgatagcttcagccataggcgctccgaaagtattccaaataaatcctgttggctctcctgttgctttatcgacgctaacacagccagtcaagacaagcaacatagccactcccatagtcgagagtgcaaaacgtttaatagatttcactgtttttattccttctttaaaaattatacctttctattctactgtttttttacaaaatatacaatagttctagagacttaatttgcgattttaaagtcagggtagggaggaaagttacttagtttgacatctaagtagctgacttttgaaaaaggtgtgggtcctttgcggatttcttggataaattttgccatggtagcagatgagtctgcttgggctaatatttccactgtgccatcgtcgttattccatactcgacctgtgatgccaccaatttcaagcgccaagctgtaaacaccccaacgaaaaccgactccctgcaccctgccttgggcgatcattctaaccttttgcataccaaactcctttgattgtgttataatatttctatgactattataacctcaaaagccaattctgtggtaaaaaatgccaagaaattacaccaaaaaaaataccgcaagtctgcttatttgattgaaggctggcacttgtttgaagaagctgttcaagctggagtgacgattgagaaaatctttgccctagaaagttatcgagaacagttagctgctttttcgcaaactgtctgggtgtcagaggatattttgctagatttggcggattctcagactccacagggaattgttgccgtggttcaaaaagaagaagtagggcaagctgactttagccagggcaagttcttgtttttggaagatgtgcaagatcctggtaatgtgggaactatcattcggactgcggatgcagcaggttttactggagtgattgtttcagataaatcggcagatatatacagtctcaagactctacgttccatgcaaggcagtcatttccacctgcccatttataggatgtcgagtcaagcgcttcttaaggaaaccaaagaggcaggtatctcagtgctggcaacaaccctatctaaagattctgttgattacagagaactgcctcctatagaaaattttgtactagtcatgggaaatgagggtcaaggaattagttccctcatggctgaaagtgcagatcaattggtccatattagcatgaaggggaaggcagagagtttgaatgttgcagttgcggccggtattttaattttccatttaagctaattttaactttctttgttataatcaaggaaagatgttcatagaaaaggagaaaagatgaatcacactattattcacgaccgcgcaggtctcaatcaattttacgctaaggtttatgcctttgttggtctgggaatcggattatccgctttagtatcaggtcttatgttgacggtctttcaatctcagttggtttactttttgatgcagggacgcctctggttgaccattgctacttttgcggagttggccttggttttcgttgccagtaacatggccttaaagaatagtccagcggctcttccagtatttttactttactctgttttaaacggctttactcttagttttgtggtggccttctatactccgggtacagttttatccgcctttgtgtctagcgcccttctcttctttgtcatggcggcagttggcatgttcaccaagaaagatttgagtggccttggtcgggctatgatggcggctcttatcggtttgctgattgccatggtagttaatattttcttggctagcggcttctttgattatatgattagcgtagccatggttttggttttctcagggttgattgcttgggacaaccaaagaattcgtcttgcttatgaacaatcacaaggccgtgtagcgacaggttgggttgtgtcaatggctctcagtatctatcttgattttatcaatctcttcctaagtattctacgtatcttcggtcgaaatgactaaaaggttcatgacatcagtgttcgaaggagcactgatttttttatatttggtcttttcttttcttggaaataggtgtataatgcttttaattaattttttgaggagtagtttatgaagaaaagttttattcatcaacaagaagagatttcctttgtcaaaaacacttttacccagtatttgaaagataagttagaagttgtcgaagttcaaggtcctatcttgagcagggtcggcgacgggatgcaggataatttatcaggtgtggagaatgccgtatcggtcaaggttctccaaatccctgatgctacttatgaagtggtgcactcacttgccaaatggaaacgccatactttggcccgttttggtttcggtgagggagaaggcctttttgtccacatgaaggcccttcgtccagacgaagattcgctggatgcgacccactctgtttatgttgaccagtgggactgggagaaagttatcccaaatggtaaacgtaatatcgcttatctaaaagaaacagttgagaagatttacaaggctattcgtcttactgagctagctgttgaagcccgctatgacatcgaatcaatcttgccaaaacaaatcacttttatccacacagaagagttggtagaacgctacccagatttgacaccaaaagagcgtgaaaatgctatttgtaaagaatttggagcagtattgcttgatcggtatcggtggtgaattaccagacggtaaaccgcacgatggacgtgcaccagactacgatgactggacaagtgagtctgaaaatggttacaagggtctaaatggtgatattcttgtttggaatgagtctctggggggagcctttgagttgtcttctatgggaatccgtgtagatgaagaaacgcttcgtcgtcaggttgccattacaggtgatgaagaccgcttggaattggaatggcacaaggctttgttgaaatggtctattcccattgacaatcggtggaggaattggacaatctcgtatggccatgttcttacttcgcaagaaacacatcggagaagtgcaaacaagtgtttggcctcaagaagtccgcgatacttacgaaaatattttgtagagaatcgaaccgcaaggttcggttttctttctcttttcgcccataatttggtataataaacggtatgaaaatcgtatcaggaatctatgggggacgtcccctcaagacactagaaggaaagacgacaagacctacttcggataaggttaggggagccatttttaacatgattggtccctactttgaagggggacgagtcttggacctgtatgcaggtagtggtggtttatctatcgaggcagtctcgcgtggcatgtccagcgctgttttggtggaacgagaccgtaaggctcaggctatcgtggctgaaaatattcagatgaccaaggaagttggaaaatttgagctcctcaagatggatgcagaaagggcattggaacaggtatctggggaatttgacctcattttcttagaccctccttatgccaaggaacaaatcgtagcagatattgaaaaaatggatgagaaagagcttttttctgaagatgtcatggtcgtgtgtgagacggataaggccgtcgaacttccagaagaaattgcctgcctgggtatctggaaggaaaaaatttatggaattagtaaggtgacagtttatgtcagataagattggcttattcacaggctcatttgatccgatgacaaatgggcatctggatatgattgaacgggcgagcagactctttgataagctctatgtcggtattttttttaatccccataaacaaggatttctccctatcgaaaatcgtaaacgggggctagaaacggctttgaaacatttggaaaatgttgaagttgtgtcttctcatgatgaattggtggttgatgttgcaaaaagactgggggctactttcctagtgcgaggcttgagaaatgcgttggatttgcaatatgaagccagttttgattactacaatcatcagctgtctcctgatatagagaccatttatttacatagcagacctgaacatctctatatcagttcatcaggtgttagggaactattgaagttcggtcaggatattgccggctatgttcctgatagtattttggaggaaataagaaatgaaaaaaaagattagatggcccttatatgtcattgcggccttgattgtgactttcttggcatttgtagtgcccttgccttattatatagaggttccaggtggttcggaagatattcgccaagttcttaaagtaaatgacacagaagataaggaagctggggcctatcaattcgttacggttggtgtccagcacgctactttagcccatatgatttatgcttggttgacgccttttacagatattcgtagtgcccaagagactacaggtggctcttccgatgttgaatttattcggatcaatcaattctacatgcaaacatcacaaaacatggccaagtatcaagggttaaaaacagctggtaaggatattgaactcaaatatcttggggtttatgttttgactgtgacagataattcaacctttaaagggattctcaacatctctgatacggtcacagcagtcaatgatcagaccttcgacagttccaaagatttgattgattatgtcaattctcaaaaattaggggactccgtcaaggtcacctatgaagaggatgggcaaaccaagtctgcagaaggaaaaattattactctagaaaatggcaaaaatgggattggaatcggtttgattgaccgtacggaagtgaccagtgatgtcccaattcgcttttcaacagctggtatcggcggaccaagtgctggtctcatgtttagtctggccatctatacccaaatagctgaccctggccttagaaatggccgtatcgttgccggtacaggtaccattgaccgcgatggtaatgtgggggacattggaggtattgataagaaagttgtagcttcagctagagaaggtgccgcgattttctttgcacctgataatcctgttagcgaagaagaaaagacagcacatcctgatgctaaaaacaactaccaaacagccctagaagcagctaaaacaatcaagacggatatgaaaatcgtgcctgttaaaaccctacaagatgcaattgattacttgaaaaacaatccctagttttaagttaagtttccaaactagcgcacaaacagagaagatggtataatagtcaaatggttcaattattattcactctaagcagtcacatgctctttatttatgtgagtttttaccttttaaagaatcttgttagatgggaaaaggttttaaaagtgacagctgagaatacaggaaaagttcgtttactagtagcctttttcagcattgtaatgggctatatcatgagttctttctttatcagcctatatcagttgtggcaagaagcgcttagaggattattataaaatcaaatgtaaaggaaataagtatggaaaaaattgtggttcaaggtggcgataatcgtctggtaggaagtgttacgattgaaggagcaaagaatgcagtcttacctttgttggcagcgactattctagcaagtgaagggaagaccgtcttgcagaatgttcctatcttgtcagatgttttcactatgaatcaggtggttctcggtttaaatgccaaggtggattttgatgaggaagctcatcttgtcgaggtggatgcgactggcgatatcacagaggaagctccttacaagtatgtcagcaagatgcgtgcatctatcgttgtcttgggaccaattcttgcccgtgtaggtcatgccaaggtatccatgccaggtggttgtacgattggtagccgccctattgatcttcatttaaaaggtctggaagctatgggggctaagattagtcaaacagctggttacatcgaagccaaggctgatcgcttacatggagctcatatctatatggatttcccaagtgttggtgctactcagaacttgatgatggcagcgactctggctgatggggtgacagtgattgaaaatgctgcgcgtgagcctgagattgtggacctagccattctcctcaatgaaatgggagctaaggttaagggggctggtacagagaccattaccattacaggtgttgagaaacttcatggtacgactcacaatgtagtccaagaccgtatcgaagccggaacctttatggtagctgctgccatgactggtggtgatgtcttgattaaagacgctgtctgggagcacaaccgtcccttgattgccaagttacttgaaatgggagtggaagtgacagaggaggctgaaggaattcgagttcgctctcaactagaaaatttaaaagctgttcatgtgaaaaccttgccccacccaggatttccaacagatatgcaggcccaatttacagccttgatgaccgttgcaaaaggggaatcaactatggtggagacagttttcgaaaatcgtttccaacatctagaagaaatgcgtcgcatgggcttgcactctgagattatccgtgatacagctcgtattgttggtggtcaacctttgcagggggcagaagttctttcaactgaccttcgtgccagtgctgccttgattttgacaggtttggtggcacaaggaaaaactgtagttggtaaattggttcacttggatagaggttactaccgtttccatgagaagttggcacagctaggtgctaagattcagcggattgaggcaagtgatgaagatgaataagaaatcaagctacgtaatcaagcgtttacttctagtcattttggtactgtttttaggtgctctagccctaggtatcggcttaatggtaggttatggaatcttgggcaagggtcaagatccatgggctatcctgtctccagcaaaatggcaggaattgattcataaatttacaggaaattaggctggagaaccagtctttttctagagataaggagaaaaatggataaaaaaacaagacagacactgatcggactgctagtgttattgcttttatctgcgggaagctattatatcaagcagatgcagtcgacagctaatagtcctaaaacaaaggttagtcagaaaaaacaagcgtcggaagctcctagtcaagaattggcagaaagtgtcttaacagacgcagtcaagagtcaaataaaagggagtctggagtggaatggctcaggtgcttttatcgtcaatggtaataaaacaaatctagatgccaaggttcaagtaagccctacgctgataataaaacaaagacagtgggaaaggaaacagtgccaaccgtagcaaatgccctcttgtctaaggctactcgtcagtacaagaatcgtgaagaaactgggaatggttcgacttcatggactcctccaggctggcatcaggttaagaatctaaagggtacttatacccatgcggtcgatagaggtcacttgttaggctatgccttaatcggtggcttggatggttttgatgcctcgacaagcaatcctaaaaacattgctgttcaaacagcctgggcaaatcaggctcaagccgaggattcgactggtcaaaactactatgaaagcatggtacgtaaggccttggataaaaacaagcgtgttcgttaccgtgtaactctttattatgcttcaaacgaggatttagttccttcagcttcacagattgaagccaagtcttcagacggagaattggaatttaatgttctagttcccaatgttcaaaaagggcttcaactggattaccgaactggagaagtgactgttactcagtaaaatacaaaataaactcctatgtcacttgtggatataggagttctttcttactagtttaagcagggctacaatagacactgatactcaatgaaaatcaaagtgcaaactaggaagctagccgcaggttactcaaagcacagttttgaggttgcagataaagctgacgtggtttgaagagattttcgaagagtatgggaaaaataatatgtactggactatattttgtgatataataaaggataagatactattttaggagaagaactatggaagacccaagtagtcagaatttgttgctacaatttgttttattgtttatcttgacggtgttaaatgcctttttctcagccacagaaatggccatggtttcacttaaccgtgcgcgggttgaacaaaaggcagaagaaggagatagacgctatatccgtctgctgaaggtactagaaaatcctaaccactttttatcaactattcaagtaggaattaccttgattacgatcttgtcaggggcaagtttggcagaaactctgggacgagaaattgcatcttggcttggaaatggcgaaacagcttatgctattgcaagttttctatctttagcatttttgacttatatttctatcgtttttggggaattgtatcctaagagaatcgctcttaacctaaaggacgctttagcgattcgtacagcgccagttattattggtctggggaaactagttagtccttttgtctggctcttgtctgcgtctaccaatcttttgagtcgtttgactcctatgacctttgatgatgctgacgaaaaaatgacccgtgatgaaattgagtacatgctgacaaatagtgaagaaacactagatgctgacgaaattgagatgttacaagggattttttcactagatgaactgatggccagagaagtcatggttcctcgaacggatgcctttatggtcgatattcaggatgatagtcaaaccattatccaaagcattttaaaacaaaacttctcccgtataccagtttatgatggggataaagacaatgtgattggaatcattcataccaagagtctccttaaggcaggctttgtggacggttttgacaatattgtttggaagaaaatcttacaagatccactttttgttcctgaaactatttttgtggatgacttgttaaaagaattgcgcaatacccaaagacaaatggcaatcttgctggatgaatacggtgggatggctggtttggtgaccctggaagacctcttagaggaaatcgttggggaaatcgatgacgaaacagataaggctgaaatcgaagttcataaaattggagaagatacttatatcgttcaaggcaccatgaatctcaatgattttaatgactactttgatgttgaactggaaagtgatgatgttgataccatcgctggttactatttgacaggagtggggaccattccaacgactgagaaactcagttatgaattagtcagccaaaacaaacagcttatcctaaccaatgataaagtgaaaaatggacgtgttaccaaggtaaaagtccaaattaccgaagttgaaatagaagaagaaacagagtaaactagaggcttttgtcaccaggcgtgacgaagcttttttcagttgatttcaagagggaattgtgtcctcgaaaaactcagccccaacctagtctcaaaagttttttaaggttatacgtatttattcgaggaaaaaagaaaaaagccctttaaattgggctttctgtttaaatgaaacctgaaaaaatcaagttatagaaggcggtagacggatttgaaccgacgatcaagcttttgcagagccgtgccttaccacttggctataccgccttaacgtttattattataccttgaaaatgattttcagtcaatagctttttcagattttttgtgtcaataagcctaaatattctgaaaattcgtttacttttcttgaaatctatgatataattgatgataacctatactttatttataagaggagtaaataaatgaaaaaaagtcaagtgcttgctgtagcgggagctaccttattagcgtcaggagttctagctgcgtgttcaaacactagttcaaataatgctaaactagcaaaagattaccaatatgtctatcaaacagatccagaaactttggattatatcgtcagcaatatcgattcaacatcattcgtcacaacaaatgctgtagatggtttgttggctaatgataaatatggtaacttggttccttctattgctgaatcatggacagtttcaaaagatggtttgacatatacctataaaatccgtaaggatgctaaatgggtgacagcagagggagaggaatacgctcctgtaactgctaaagacttcgttactggtttgaaacacgccgtagatggaaaatcaaaaggactttcaatcgttagctcttctattaagggattagaagcctatatcaagggtgaaacaagcgatttttcaaccgttggagtaaaagcacttgatgatcaaacactagaatataccttgaaccagccagaaactttctggaatgacaagaccactagtggtgttttgatgccggttaatgaagaattcttaacttcaaaaggggaaggttttggtgccccaaccgatgctaactctattctttataacggtccatttgtcttaaaatctgtaactccaaaatcatctatcgagatggctaaaaatgatgcttactgggacaaagaaaatgtaaaaattgagaacgttaagttcactttctgggatggtaaggaccaagatgtgattgccaaaggttttgctgatggtcaatatagcaaggctcgtatcttccctacaagttctacatatgaaaaatatgcagctgactttaaagataacatttactttaatgaaccaggagcgggtgttgcaactgtcagcttgaactatggccgtacaacctataatcatactgccaaaacaagtgatgctcaaaagacatctactcagaaagcattgctaaacaaggaattccgtcaagccttgaactttgctgtcgatcgcaattcttactcagctcaaacaaatggtactgatggagctgcagtagccatccgtaatacattcgcaccatataatcttcaagttggtaagaaaacatttggtgaattggtacaagatagcttggctaagacaaattcttctacttggtcaaacgtgtctctagcagattctcaaaatggcctttacaatgaagaaaaagcgaaagaagtctttgctaaagccaaatcaagtctacaagctgaaggtgttgaattcccaatccacttggatgccctggttatccaagaatcaacagcggttgtaaaccgtgttcaatcattgaaacaatcaattgaaaaagtattgggttcagataatgttgttgtagacttacaacaaatgactcaagcagaagctttaccaatttcatttagcgctccaacagctaaagagcaagactgggatatccataccttgctaggatggaacccggactatcaagatccttctactttcttggatcaattcgtccttaagggaggaagcactcgcctttaccttggtattgaccaaaacacagatgcatcagtagtaagcaaacttggtttagctgactatggaaaattacttgatgacgcaaacagcgaaaaccaagatgttcaaaaacgttatgaaaaatacgcggtggcacaagcttggttgactgacaatgctttgacaattccagtaatggcttctcctaaagaaacagccgtttcatatgtttcaaaagttctaccatttagctcttcatattctgtagccggccttaaaggtgaaaattcaggatacttgaagtacactgaagttggtgaaaaagcaatcaccaaagaagagtatgaaaaagctcgtgaaaaatggttgaaagaaaagactgagtcaaacgaaaaagctcaaaaagaattggcaagtcatgtgaagtaaataattttcaatagaactttctctccatgaggagaaggttcttttgggatttttaaaggaaatgatatgaaaaaatatatttttatgcgtgttttgcggtccttggtttctatcttcttagtaacaaccttgacttacacgattatctatacaatggttcctcgaaaattgattttcaaacaggataccaactataacaagattgctacaactgctgataaacgtgataactatgagaataccgtttatgagcgtatgggctatatcgagtactacgataccaaagagttgcaagaaaaagctagccagatggatgcttctgtaacagttgaagccaatgataccaacaaggctatctatgaaaaatacatcaaacaaatcggtcatggttggaccctgggagaatttactgaaagtggccaattctacgctacgcgtgaaatcccgatttttgaacgtgtttttcacttctatgctaacttgattgacattgatcatacaaataaaattcaagaccctgaaaatccagacttgaaacgttaccttcgttttgaaaacgatccagcgatcggatggtccttggtcggttcaggaacaaaacacaaatatctcttgtacttcaacagtcagttcccgtttgtgcatcaaaactttgtgaacattaatttaggtgactcttatccaacctatgctaatagccctgttttacaggtcattactcaaggacaagggcaaacaaaaacatctcaagttcagttcccaacaggtaagaaaacttcttctgtaaatatttactcaagaacctacaaatcgcctagtcaggctgattctcgtgaagtagccaactatgggaaagatgacccatatactgcaactgaaagcaactaccaatatccttctatgattgctagctctgcagtcgttggattgattggtttggtgatttcttatgcgattgccgtgccacttggttcagctatggctcgcttcaagaatacttggattgatagcttctcaacagggtttttgaccttcttgatggcccttccaaccattgccttggtttacattgttcgtttgattggatcatcaattggtcttccagattcattccctattttgggtgctggagattggcgttcgtatgttttaccagcagtgattcttggtttgttgggtgctcctggtacagctatttggattcgtcgttacatgattgacttgcaatcacaggactttgttcgttttgctcgtgccaaaggtttgtctgaaaaagaaatttcaaacaaacacatctttaaaaatgccatggttccgctggtttcaggaattcctggtgccgttatcggggttattggtggtgcaacccttactgaaacagtcttcgccttcccaggtatgggtaaaatgttgattgactctgtaaaagcatctaataactctatggtcgttggtcttgtcttcatctttacatgtatttctatcttctcacttcttttgggagatatttggatgactattattgacccacgtattaaattgactgagaaaggaggcaaataatgtctacaatcgataaagaaaaatttcagtttgtaaaacgtgacgattttgcctctgaagctattgatgcgccagcttattcatactggggttcagtgtttagacaatttatgaagaagaaatcaactgtagtcatgttgggaatcttggtagctatcattttgatgagtttcatctacccaatgttttctaagtttgatttcaatgatgtcagcaaggtaaacgactttagtgctcgttatatcaagccaaatgctgagcattggttcggtacagacagtaacggtaaatctctttttgacggtgtctggttcggagctcgtaactctatcctcatttctgtgattgcgacagtaattaacttggttatcggtgtttttgtcggtggtatttggggaatttcaaaatcagttgaccgcgtgatgatggaagtttataacgtcatctcaaacatcccatctcttttgattgtcattgtcttgacttactcaatcggagctggattctggaatctgatttttgccatgagtgtgacgacatggattgggattgccttcatgatccgtgtgcaaatcttgcgttatcgtgacttggaatacaacttggcgtcacgtactctgggaacaccaaccttgaagattgttgccaaaaatatcatgcctcaattggtatctgttattgtgacaaccatgactcaaatgcttccaagctttatctcatacgaagccttcttgtcattcttcggtcttggattaccaattaccgtgccaagtttgggtcgtttgatttcggattattcacaaaacgtaacaaccaatgcttacttgttctggattccattgacaactcttgtcttggtatccttatcccttttcgtagttggtcaaaacttagcggatgctagtgatccacgtacacatagataggagtagaaatgacaaaagaaaaaaatgtaattttgactgctcgcgatattgtcgtggaatttgacgttcgtgacaaagtattgacagccattcgcggcgtttcccttgaactagttgaaggagaagtattagccttggtaggtgagtcaggatcagggaaatctgttttgacaaagacattcacaggtatgcttgaagaaaacggtcgcattgcccaaggtagtattgactaccgtggtcaagatttgacagctttatcttctcacaaggattgggaacaaattcgtggcgctaagattgcgactatcttccaagatccaatgactagtttggacccaattaaaacaattggtagtcagattacagaagttattgtaaaacaccaaggaaaaacagctaaagaagcgaaagaattggccattgactacatgaataaggttgggattccagatgcagatagacgttttgatgaatacccattccaatattctggaggaatgcgtcaacgtatcgttattgcgattgctcttgcctgccgacctgatgtcttgatttgtgatgagccaacgactgccttggatgtgaccatccaagctcagattattgatttgttgaaatctttacaaaacgagtaccatttcacaacaatctttatcacccacgaccttggtgtggtggcaagtattgcagataaggtagcggttatgtatgcaggagaaatcgttgagtatggaactgttgaggaagtcttctatgaccctcgccatccatatacatggagtctcttgtctagcttgcctcagcttgctgatgataaaggggatctttactcaatcccaggaacacctccgtcactttatactgacctgaaaggtgatgcctttgccttgcgttctgactatgcaatgcagattgacttcgaacaaaaagctcctcaattctcagtatcagagacacattgggctaaaacttggctacttcatgaggatgctccaaaagtagaaaaaccagctgtgattgcaaatctccatgataagattcgtgaaaaaatgggatttgcccatctggctgactaggaggaaggaaatgtctgaaaaattagtagaaatcaaagatttagaaatttccttcggtgaaggaagtaagaagtttgtcgcagttaaaaatgctaacttctttatcaacaagggagaaactttctcgcttgtaggtgagtcaggtagtgggaaaacaactattggtcgtgccatcatcggtcttaatgatacaagtaatggggatatcatttttgatggtcaaaagattaatggtaagaaatcgcgtgaacaagctgcagaattgattcgtcgtatccagatgatttttcaagatcctgccgcaagtttgaatgaacgtgcgactgttgattatattatttctgaaggtctttacaatcatcatctgttcaaggatgaagaagaacgtaaagagaaagttaaaaatattatccgtgaagtggggcttcttgctgagcacttgactcgttaccctcatgaattctcaggtggtcaacgtcaacgtatcggtattgcccgtgccttggtcatgcaaccagactttgttattgcggatgagcccatttcagccttggacgtttctgtgcgtgctcaagtcttgaacttgctcaaaaaattccaaaaagaacttggtttgacctatctcttcatcgcccatgacttgtctgtcgttcgctttatttcagatcgtatcgcagttatttacaagggtgttattgtagaggttgcagaaacagaagaattgtttaacaatccaattcacccatatactcaagccttgctttcagcggtaccaatcccagatccaatcttggaacgtaagaaggtcttgaaagtttacgacccaagtcaacacgactatgagactgataagccatctatggtagaaatccgtccaggtcactatgtttgggctaaccaagccgaattggcgcgttaccaacaagggttaaattaataatggttttataatttccatgtcaacttttatggaaattataaaccttttttgttggactgatttgaaaaaactttgaaagaattttcgaaagaaatagaattcttagaaaatcattgaattatagtgagatgaaataaaatctgaacaactcgattaggaaagtcaaattaatttctagaaaaggtttagaagtcgcggcgtattactctagcttcaatctactatagtctaatactcttcgaaaatctcttcaaaccacgtcagctctatctgccacctcaaaacagtgttttgagcaacctgcggctagcttcctagtttgctttttgattttcattgagtctaatatctacaatgtaaaaaactctagctatcagttcattgatagttagagttttttctattcatatgatttaaggagtttaaataaagcttctatttctgatgacggtgtagctgatttaaggtaagcgtaataaactgtaaaagttatcttatccttcggtataagaggaatttttattaaatcgtcatcttcatcagaaagtgcgatatcagccagtaaactaaggccaattcctttctttaaaagttctttaagaatgacaatgtcatcagtcttaaagaatatttctgccttgttttgatgcttttgattaagcgtttcaaaagctttcaggtgaacaaagtgttcgtctaagagtataaaggattgatctactaattcttcaaaagcgagggaaggagcagtggcaaaaggatggttcttagataaaacgacatacagttctttatgaaatagctcgtgtgtctctattgaaggataattgagaggttcaatcaaaccgagtaggcttacattaaggtctcccttaaggagaaggtttaataactctacggaaccaccgcggataggacgtatcttttttaaaaaatcgaatttatctttttcgtttaaggcagcaaagagatactgaatgataataggagggaatcctacagtagagtattgtgccaaggagcgattaatttctttgcgagtagaaatgaactcaggtaaaatcagttctgtatgctttagaaggatttgtccttgaggagttagcttgaaggaacgatgcgaggggtcatggtgaatcaatttgcagttaaagtattcctctaagcgcttgatagcataagaaatagatggttggctgactttatgttgttttgctacttccgtataggattgaagctggcagaggtcataaaaatattgtagatcttttaaattcatatgggttcactttcattagttggagaaggaaaataagtggaaaacagcagataaataatttttatccgtatcctacaatttgactatacgagtattcaccagttaaaatgtaagtgagtcagggatctcaaagattatctaagatactctcaaaaatgaccaacattttttctcgtttatcaatagggagctgtttaatcttcatgttgattcttttgagtgaaagattgtcactcttatcagaggttgattcaaggctatcaaaattgaaaaattcctctggggttatttctagggcgtcaatcactttttcaagactgtgaatggtcagattcacattttggttttcaagttgattgatatacttaagcccgaggcctgcttgttctgaaagttcttcctggctcattttattctgtgttcgaaaatatttcactttttgggaaatatattgttgtaaatagtttttagttgtcatataaatagaatacaagttttatatgacaaaaaaacaccttaaaaaatacaaagtattacataacatacctatatgatatttattttaattaggattgtcaatttgtatgattggtttattttactcgaaacttttagtaaagagagatcatcgagagtttgatgagttcagaaatttataacatatgcgtatacaattgtattatttaaacaacaacgttttacgaacaattcgtttcatgtggtataatataagtaaaaaggaggttgcactatgacttcacatgatattttaaacaatcctttactcaataaaggtactgcctttaccttagaggagcgaaaggaactaggccttattggtttattgccaccgtatgttcaaacgattgaagaacaagcggcgcaaacttatgcacaaatgcaaacaaaagccaatgatttggaaaaacgtctttttctaatggaaatttttaataccaacaggactcttttctattaccttttttctcaacatttggaagaattcaatccaattgtatatgatccaactattgcagatacgattgaaggctatagtgatctttttgtagatccccaatatgcgggatatcttgatattaatcatcctgaaaatattgaagctactttgaaaaacgctgccgggggtcgcgagattcgtctcattgttgtaacagatgcagaaggaatccttggaattggcgactggggaacaaatggtgtcgatatttctgttgggaaattgatggtctatacgggtgctgctggaatcgatccttcgatggtccttcctttagtcattgatgcagggactaaccgtgaagaacttcgtaacaatcctaattacttaggaaatcgtcacgaacgggtctgcggagatcgttactacgacttcattgaccaatttgttcaaacagcagaacgtctctttcctaaactctaccttcactgggaagacttcggccgcttgaatgcagccaatattcttgaaaaataccggaaacaaattccgacctttaatgatgatattcaaggtacaggaatcgttaccttgggtggtatctttggttcgctggatattagtggtgaaaaattaatagatcaagtttatctttgctatggtggtggtactgcgggtgcaggaattgcctctcgtgttcttcgtgaaatggtaagtgaaggtctttctgaagaagaagcctataaacggttctttatggttgataaacaaggtcttctctttgatgacatggatgacttgacaccagagcaaaaaccatttgctaagaaacgtgctgactttagtaacgcagataagttgactgacctgcttgaagtagtgaagactgtgaagccaaccattcttgtaggaacttcaactcagcctaataccttcactaaagaaatagtagaagctatgtgtgaaaacacagaacatccaatgatcttccctttgtcaaacccaactaaattggcagaagctagtgccaaagatttgattgaatggtcagatggtaaagcttttgtcgcaacaggaattcctgctgatacggtttcttataaaggtgtagactatgtgattggtcaagcaaataatgccctgatttacccaggtcttggtctaggtatgctggcttctgaagcaagtcttttgactgatgaaatgattggagcagcggcgcattcattgagtggtattgtcaatccaggccaaccaggagctcctgtcttgccaccattcaagtatgtagcagatgtttctattaaagtagcagaagcagtcgctaaaaaagcacaagagcaaggtcttgcacgcgctaaggaaacagatatggccaaagcagttcgtgatttgaagtggtatccagagtataaataattcatttctgttgcctatcctcgggatacttggcttattttggatatgttagcaatctacagagttgataaccgaaaagtaaagagattgtcgtattgactattggttttaaacagtataaaataactgtcgattttttgtccgactgcaagagttagtttaatactatactaaaatcaaaacgcattatataatagtgatatgaaatcaaccaaaaaagaaatacaagccatcaaaacacttttaaaaaactctagtacaactaaataccataaaagtcttcaaatcgttctattttgtctaatgggcaaatctttgaaattatcctaaaagaattgaaagaattatgaaagaattttcgaaaaattttaaaaaattctgaaatattcttgacaggtgatgaaaaaggtggtaagataggaaacatcaaaaaagaaagcagaaaaagaaatgaacaagaaacaagctgtaacgatgaatcaaaacttttactttagctactttagatagtgtttgtagacatgtcaccatggatgcaaacagttcaagcaatttgtttgtatctatgtggctaagatttttgattgtggtccatatagatgaatatctaaatggactagcaaagttataacttgttagattatttcaagcatccgtttaggtattatctaggcggttttttgttttatactcttcgaaaatcaaattcaaaccacgtcaacgtcgccttgccgtactcaagtacagcctgcggctagtttcctagtttgctctttgattttcattgagtattatcttttctgagaaggagtttcattatgaaagttgttcgaaaattactagcacccctcttggtagtggggattctcttgacctctctgatcagtttgcatcagttgaaggcagataagaaaaaagatgtatttcgtatcggtatttcacaatttattacccaccagtctctagacgctaccagagaaggctttgtggatgagctggccaagcaaggctatgttgaagggaaaaatatcgagattgatttgcaaaatgcacagggagaacaacgaaatcttaaaacgatttcccagcaactagcagaatctagtgatgtcgttctagctattgcaacgccttctgctcagagcttggccaatacaacacaaacgacacctgttatcttttcagcggtaacagatcctgtcagttccaagttggttgagtcaagagagcatcctgggggcaatgtgactgggacaagtgaccagtcatcagatgccatttcaacccaaatcaatttgataaagaaagtgttgccaaaagctaaaacaattggaattctttatactcagagcgagccaaactcagttgtccaaaaggatgaagctaagcgtcttctggaagaaaaaggctttaccgttgttgaaaaaacaatcttggacagtaacaacgtcaaggcggcagcagagagtttgatggcagaggtggatatggtttttgtcccaacggataatatcatttcgtcaaccatggaaacagttaagcaggtttctattaaacacaaggttccagtattcggtggttcaacagaaatgattgctgttggtggcttgtataactacggaaccaattatgaagaattaggaagacagacagctcgcatgttgattcgtgtcttaaaaggtgagaagccagaaaatatagcagttgagttgcctgaaaaactggaattgcataccaatcaagaaatggcagatgcattgggaattgatattagtaagttagaaggcaaggaataaggaggtttgagatgaattttgtattatctagtttatcagaaggtttgctatggtcgattatggctattggggtctacttgactttccgtattttggatattgcagatatgactgctgaaggagcctttcctctgggggcagcagtcgttgtatctcagatacaggcagggacaaatccttggattgcgaccttacttgctttgctggcaggtatggtagcaggtcttgtatcaggaatgcttcacaccaagatgaaaattccagctctcttgacagggattgtgaccttgacagggctttattccatcaatattaaaatcatgggaagtgtgcccaatctttccttgggagattcttcgactgtctttaaacagttggcgagcttaggactgacaaatgaagaagctgttttctcattcagtttggcctgtctcttacttgtttgtttggtcttgactcttttgatgaaaacagagattggcttggtcttgcgttcgactggggacaatattccgatgagtgaggccaatggggtcaatgtagacaccatgaagattgttggttacatgatttcaaacggcttgattgccctatgtggttctttgtttgcccaaaatgatggattttcagatgtgacttctgggacaggaaccattgttgttggtttgagtgcagtgattattgcggaagtcttgatccacgatttgaccattggaggccgtttgttatccatcggaattggtgcaattgtttaccgtttgattattttaaatatctatgaaattccaaatctagatcaaaacctggttcgtctctttaatgcaatcttgttagccttagttttatttgcaccagaattgcaaaagagattaaagattcgtggtctgaaattgagaaatgaataggaggagaaagttatggcaagtttgttaacacttgaaaatattcacaaaacatttgaagcagggacggtcaatgagaaccatgtcctcaaagggttagatttagaggttgaagagggagattttatctctgtgatcggtggaaatggagcagggaaatccactttgatgaatatcttggctggcaatctatcggtggacgaaggggaccttttattggcaggcaaatccattaaaaatctgagtgtaagaaagagagccaaggatatcgcccgtgtttttcaagatcctaagatgggaacagcttctcgtttgacgattgaggagaatatggctattgccttgagacgcgggcagaagagagggcttggttggggcgtgaaggagaaggatagaatccagttccaagaggccttgaaggagttgaatattggtcttgaaagccgcttaaaagtagatactcaatacctctcaggaggacaaagacaggctttgaccctagtcatggcagctctggtgaaacccaaactcttgcttttggatgaacatactgcggcacttgacccgaaaacgagtcaaatggtgatggatttgacgcaaaagattgtggaacaccatcagttgacgactttgatgattacccacgatatgaaccatgcgattgagtacggcaatcgtctcattatgctctatcagggtaagatagtggtggatgtcaagggagaggagaaaaagcatctgacggttgaagatctcatgcatctcttccagaaaaatagtggccaaagtctagttagtgatgaattagttttgggataaagaaaaaggctgagatgtggtgtctcagtcttttattagtacaaatggataggcagaaatatgaaattgatactcttcgaaaatctcttcaaaccgtgtcaactctatctgcaacctccaaaccgtgttttgagcagcctgtggctagcttcctagtttgctctttgattttcagtgagtataaactcagtagggagctctcttttgcagaaaagcagggttctttttgctgtctattccctccctgaaagcgtaaaacaaactagtcagggtggctagtttgtggtataatgaaagagactcaaaaagaaacaggagaaaaatgatggatttactattagcaattgtattgattgtgctagcttttctaggaggagctcttggagggatgtacttggttcgtaagcaaattgaaaaagaattcgctgacaacccacgtttgaatgctgaagcagttcgtactcttttgagtgcaaatggtcaaaaaccaagcgaagctaaggtacaacaagtttaccaccaaatcatccgccaacaaaaggcagcccttgctaacaataaaaagaaaaaataaataaggaaaagtctgggatgaaagttccagacttctcactatgttggttatggtttaggaatgcgactttttccttgcattctattgatatttgattatgattaagagagatagttgttgattaggatgtcattcagttcataaggatcaataatcataatgaactatcaatcagaaaaaagactagaaagaagactgtatggataatcgaccaattggttttttggattcgggtgtcgggggcttgaccgttgtgcgcgagctcatgcgccagcttccccatgaagaaatcgtctatattggagattcggcacgggcgccctatggtccccgtcctgctgagcaaattcgtgaatatacttggcagttggtcaactttcttttgaccaaggatgtcaaaatgattgtcattgcttgtaatactgcgactgccgtcgtctgggaagaaatcaaagctcaactagatattcctgtcctaggtgtgattttgccaggagcttcggcagctatcaagtctagccaaggtgggaaaatcggagtgattggaacacccatgacggtacactcagacatctaccgtcagaaaatccatgatttggatccggacttacaggtggagagtttggcctgtcccaagtttgctcccttggtggagtcgggtgccctgtcaaccagtgttaccaagaaagtggtctatgaaaccctgcgtcccttggttggaaaggtggatagcttgattttgggctgtacccattatccactcctcagacctattattcaaaatgtcatgggacccaaggttcagctcatcgatagtggggcagagtgcgtacgggatatctcagtcttacttaattattttgaaatcaatcgtggtcgcgatgccggaccactccatcaccgtttttacacaacagccagtagccaaagttttgcacaaattggtgaagaatggctggaaaaagagattcatgtggagcatgtagaattatgacaaataaaatttatgaatacaaggatgaccaggactggtatgtcgggtcctatggtatttttggtggcgtccggacgttgacggatgatgacttggattttcctctattggagtttgcccaaagatttcgagatgaggatcgaggttttcctgtttctgttactgttttacgctatggttccctctaccgtttattgtcttttgtggtagatatcctcaaccaagaaatgggacgaaatgtggaagtcatccaacgtcaaggggctctgctcgtggttgaaaatgggcaactcttgtatgtggaattgcccaaagaaggggtcgatgttcatgatttctttgagacaaacaaggtcagagaaaccttattgattgcgactcgaaacgaaggcaagaccaaagagttccgagctatctttgacaagctaggctacgatgtggaaaatcttaatgactatcctgacttgcctgaagtagcagaaacaggcatgaccttcgaagaaaatgcccgtctcaaggcagaaactatttctcaattaacaggcaagatggttctggcagatgattctggactgaaagttgatgtccttggtggcttgccaggtgtctggtcagctcgtttcgcaggtgtgggagctactgaccgtgaaaacaatgccaagctcttgcacgaattggccatggtctttgaactcaaggaccgctcggctcaattccatacaaccctagtcgtagccagtccaaacaaggaaagcttggttgttgaagcagactggcatggctacattaactttgaacctaagggtgaaaatggctttggctatgaccctctcttccttgtaggagagacaggcaagtcctcagctgaattaacccttgaagaaaaaaatagtcaatctcaccgtgccttagccgttaagaaacttttggaggtatttccatcatggcaaagcaaaccatcattgtaatgagcgattctcatggcgatagcttgattgtggaagaaatccgtgatcgctatgtgggcaaagttgatgccgtttttcataacggcgattctgaactgcgtcctgattctcccctttgggaaggcatccgcgttgttaaagggaacatggacttctactccggctacccagaacgtttggtgactgagcttggttcgaccaagattatccaaacccatggtcacttgtttgacatcaatttcaactttcaaaagttggactactgggctcaggaagaagaggccgatatctgtctttatggtcacttgcatgtgccaaacgcttggatggaaggaaagactctttttctaaatccaggttctatcagtcaaccgcgtgggaccatcagagaatgtctctatgctcgtgtggagattgatgatagttacttcaaagtcgactttttgacacgagctcatgaggtgtatccgggcttgtccaaggagtttagccgatgattgccaaggagtttgagactttcttgttggggcaagaggaaacttttttgactcctgctaaaaatctagctgtgttgattgatactcacaatgcggatcatgcgaccctcttgctcagtcagatgacctatacccgtgttcccgttgtgacagatgaaaaacactttgttgggacgattgggctcagagatattatggcttatcagatggagcatgactttagtcaagaaatcatggcagatacggatatcgttcatatgacgagaacggacgtagcagttgtctcgcctgattttaccattacagaggtcttgcacaaattggtagatgagtccttcttgccggttgtggatgcgtctggtattttccaaggaattatcacgcgcaagtctatcctcaaggcagtgaatgccctcttgcatgactttagtaaggaatatgagattcgatgcaaatgagagacaagatttcagcctttttagaggaaaagcagggcttatctgccaattctaagcagtcatataagtatgatttagaacagtttttagatttggtaggtgagcggatttctgagaccagtctcaagatttaccaagcccagctagccaatctaaaaatcagcgcccagaagcgaaagatttcggcctgtaaccgatttctctactttctctatcaaaaaggagaagtggatagcttttaccgcttggaattagctaaacaagctgaaaagaagaccgaaaagccagaactgttagacctagactctttttggcaggaaagtgactatccagagggtcgcttgctagcactcttaatcctagaaatggggctcttgccgagtgagattttagctctcaaggttgaggatatcaatctggattttcaggtgttgcgaatccagaaggcttcccaacagaggattgtcaccattcccacgagcttgctttcagaattggaacccttgatggggcagacctatctctttgaaagggcagggaaagcctattctcgtcagtgggccttccgtcagttagaagcttttgtcaaggagaaaggtttctcaaccttatccgctcaagccttgcgggaacagtttattctaagacaaatagaaaagaaggtcaatttgtacgaaattgcaaaaaaattaggattaaaaacagtcctgaccttagaaaaatatagataatggatattaaactaaaagattttgaagggcccctggacttgcttttgcacctggtttctaagtaccagatggatatctacgatgtgcccattacggaagtcattgaacagtatctagcctatgtttcaaccctgcaggccatgcgtctggaagtgacgggcgagtacatggttatggccagtcagctcatgctgatcaagagccgtaaactccttccaaaggtagcagaagtgaccgatttggaggatgacctggagcaggaccttctctctcaaatcgaagaataccgcaagttcaagctcttgggtgagaatttggaagccaagcaccaagatcgggcccagtactattccaaagcgccgacagagttgatttacgaagatgcggagcttgtgcatgacaagacgaccattgacctctttttggctttttcaaatatcctagccaagaaaaaagaggagtttgcacagaatcacacgactatcttgcgggatgagtataagattgaggacatgatggccatcgtaaaagagtccttgaccggacgagatcaattgcgcttgcaggatttgtttaaggaagcccagaatgtgcaagaggtcattaccctctttttggcaaccctagagttaatcaaaacccaggagctgatcctcgtgcaagaggaaagtttcggagatatttatctcatggaaaagaaggaagaaagtcaagtggcccaaagctagacttgatagagaggaaagatgagtactttagcaaaaatagaagcgctcttgtttgtagcgggtgaagatgggattagagtccgccagttagctgaactcctctctctgccaccgacaggcatccaacagagtttagaaaaattagtccagaagtatgaaagggacccagattccagtttggccctgattgagacagggggcgcttatagattggtgaccaagcctcagttttcagagattttgaaggaatactctaaggcacctatcaaccagagtttatctcgggctgcccttgagaccttgtccatcgttgcctacaaacaacccatcacacggatagaaattgatgccatccgtggggtcaactcgagtggggccttggcaaagttgcaggcctttgacttgatacgagaagacgggaaaaaagaagtgttgggtcgccccaacctctatgtgactacagattatttcctagattacatggggataaaccatttagaagaattaccagtgattgatgagcttgagattcaagcccgagaaagccaattatttggtgaaaggatagaagaagatgagaatcaataagtatattgcccacgcaggtgtggccagtaggagaaaagcagaagagttaatcaagcaaggcttggtgacggtcaacggccaggtggtacgtgaactcgcaacgaccatcaagtcaggagacaaggtcgaagtagaaggtcaaccaatctacaacgaagaaaaggtttattatctgcttaacaaaccacgaggtgttatttccagtgtgacagatgacaagggccgtaagacagttgtggacctcttgcccaacgtgaaagagcgcatctaccctgtaggtcgtttggactgggatacatcaggagtcttgattttgaccaatgatggggattttacggatgaaatgattcaccctcgtaatgagattgataaggtttatgttgcgcgtgttaaaggtgtggccaataaggacaatcttcgtcccttgacccgtggacttgagattgatggcaagaaaaccaagccggctgtctatgagattctcaaagtggacccagttaaaaaccgctctgtggtacagttgactatccatgaagggcgtaaccaccaggttaaaaagatgtttgaagctgtcggtcttcaagtggacaagttgtcacggacccgttttggacatctagacttgacaggactccgtccaggagaatcccgtcgtcttaacaaaaaagaaatcagccaactacataccatggctgtaaccaagaaataatgaaacgaattttaatagcgcctgtgcgcttttatcaacggtttatctcgccagcctttcccccctcttgtcgctttgagcctacttgttccaattacatgattcaggctattgaaaaacatggctttaagggtgtcttgatgggcttggcacggattttacgttgccatccctggtcgaaaacaggtaaggaccccgtcccagaccacttttcactcaaacggaatcaagaagaaaaatgaggatgggtaaaaatattttagtgaaatgataaaaacgcatcctatcaggtttgagtgagtctgataggatgcgttttatcatgtaaagatgttagttgagtttgaagttgcttatttcaaggctttttgtgcgtcttcaatcatgagttttgttgattcaagaccgcctccgcttagataccagaggtctggtgtgagttggataattttaccatttttagcggcaggagtttcagcgatgagggcattttctaggacgccgtcgttgcttgagttgtccccaccgatggcaagggtacggttgatgacaaaaaggatgtcaggattgatttctttgacactttcaaagctgacttcttgtccgtggcgagagtcttcaaattgagtatctgttggcttgaatttcaaggtttggtacaagaaagagaaacgagattgggcaccaaaggcagccattttcccttcgttgaggaggatagcaagggcttttttgtcagaactttcatttttagtagcgacttcttgtatgctcttgtctagcttggccaattcttccttggctttctgtgtaccagtttcaccaaaggcgcttgctagggattcgatattagccttggtagaagtccagtagtcatctttgcctgcttggaagagaacagtcggagcgatttcgttgaacttatctacgaatttttgggtacgtggtgaagcgataattaggtctggttcaagagcagcaagggcttctaggtctggctcaaccatagaaccaacatttttaacttttccagctaggtctttaagataagtcggaacagtttttataggcattccgacgatattcttttcaaaacctaaagcgcgaatagtatccgcagcaccgaggtcaaaggtcacaatcttttcagggacttttgaaagtgtgactacacctagtgaatttttaatggttacctctgttggagcagagctacttgactccgtcttactagtgcttgagtttgtactacatgcaccaagtaggagcaagaagctggctactagggcagtgaggtaaagtttgagggatgttttcatgatttctcctttttaaaatgtgataacgatttagggagtctctaggttttattgactaagagactgaaggttctctaacttgagcttctatgttactagctatagatacagatctttttgccattgatatcagctagcgtgatgggaatctcatagagttgactgagcaggtcagcctgcatgatttgattggttgttcccttgctaaagacttgaccgtccttgaaggcgacaatttcatctgcatactgactggccatgttgatatcgtggagaacgatgataatggttttgtcgagttcctccaccagtcgccgaagaatctgcatcatgctgacgctttgcttgatatcgagattgttgagtggttcgtccagcaagataaagtccgtatcctgggccagtaccatagcgataaagacccgctggagttgtcctccagacaggctatcgatgtagcggttttttaagttggtcagttctaaatagtccagagtttcttgaattttttcccagtcttctggtctaagtcgacctcggctgtagggaaaacgtccaaaactgaccagttcttccaccgtcaatttggcttggtaattgattttctgctttaggatagtcagttcttgagccagttcttgcgaattccagctctcgatttcacggtcttttatactgagaattccctgatctttcttggtcagtctgctcatgatggagaggagagtcgattttccagcaccatttggaccaataaaggctgtcagtttctgaggactgacttcaagcgaaatgccttgcaaaatatcctgtttttgaatggatttgtcaatgtttttcagtttcaccgacgcgccctcctataaagtaagataaagaataagaagccacccacactctcgatgatcatactgatgcgaatttccatagcaaatactcgttcaattagggcttgccccaaagtcaaactgataaatccgatcagaatggccacgataaagagtaacttgtgccgatagtcattgacaattaggtaggtgaggttggctagcataaaaccgaagaaggccataggtcctaccaaggcagtagccgttgaagtcaaaagcacgataccccagaggagttctctctgttctttttcaacattgagccccaatatctgagcagtttctctttgcaggtgcaagacatcgagaatgactgctttttgaaagaaaaagattgtcaaagcgaggatgattagagaaccgatggttaggatggaagtgttgagatgttgaaaggaggcaaagagactgttttgcagtttatcgtattcatttggatccatcaggacttggaggaaggtactgatatttcgaaagagacttccgagggctagacagatcaacagaatgaagacaaggtcttgcttcatcagtgtcttcaagtagccttgtaaggcaagaaagaagagggattggatgagaagtaagattaggaattctaagataggggacttgccaagttgaagaaacttactttcaaaaaccagtagtagagtttgcagtaggacgtagaaggattcgattcctaaaatacttggcgtcaggaaacgattttccgtcagtgtttgaaaactaatggtcgaaatccctgtcgcgatagctaccaagagataaacgatgatcttttgggaacgcagcttccaggcaaaggctgacaagtgagtaatgggccaaaaatagaggagacaagctccgatggccagaataatgagaaggcagaatagcttagtatgtttgcttttagactgcatcttttcgtccccctctccagagaagtaggataaagacgaggctaccaatgattcctagtagaagactgacagacagctcatagggccgaatcagaactcgggataggatatcgcaggccagaactagattggcaccgaccagtacgaccatgagtttggtttggctcagattatctccatagtgcttgcgaacaagatttggaacgatgactacgagaaatggcaagccacccacggtaatcatggtgacactagtcgttagagccacaagaaagagggccagtttttcaagtagggagtaggaaatccccaaactctcgctggtttctttgcccagattcatgatggtgaaggtttgggataatttccaaacggctatcaggataatgaggcctaagaaaagccattcatactgatgggtctgaatcatggagaaggagccctgggtccaagctgtcatactctgaaccagattgaaacggtaggcgataacttctgtcacagaaccgataatcccactatagatgatcccaatcagaggcaacatccacctttcctttacagtaaaaatggccataaaggctaggaagaagagggtgaatacgatggatgaaacaaaagcgaagagcatcttttgagtcagactagccgacggaaagacaaagaggctcaataccattcctagtttggcggcttcagtcgttccaactgtactcggtgcagcaaactgattttgagtgatagtctgcatgaggagccctgccatactcatactagaggcagtcaggagaatgctaatggttcttggaagacgggactcttgaaagagaagccaagtttcatgatccagtgcaaagagttttccccatgaaaaatcactggtcccaatgctaatagagagaaagaccaggagtagaagtaagccaattaaataatgagaaagtttcataccccgtcctttcatgtggatttggtatcgaaagatacctgcggatattaatgtaacacgaattatttaatctgtcaataaattttctgacaatttaatgaataaaacaaggagagagcgccaaggctttctcctttgttatcctattccaaaatgtttttgccttctttaacacgccaacgataatctgataaaataatatcttcgagggagtagctagccttccaatcaagatattgtttagcttttgatgcgtctgctaggacgctagctgggtcaccagcacggcgagcaacaatttcgtgtggtattttttgattcagtaattcttcagcagttttaaagatttctttgacggtatagcctttttcagttcctaagttaaagatttgagaagaactgtcttcttgaaataggtagttcattcctttaacatgagcctgtgcaaggtccaagacatgaatgtaatcccgaatacatgaaccatcacgtgtatcgtagtcatctccaaatattttcaggctatcattttgtcccaatgcggtcttgttgatatttggaatgatatgagttggatttttcactcgcagaccgtttgaagcatccatttcagccccagctacattaaagtaacggaaaatgacatatttccaattatagcgattggccatccagtaaatcattcgttcacccatcagttttgtttctgcataagggttgacagggtcgagcagggtatcttcagttgcaggcttgtcaatacagttattaccatagagggaagcagtcgaagagaacatgattttttgaataccaacttcagataagactttgagaacttggttcatacccgcaacattggcagtgaagtatttacttggattttccaatactttcgctcacaacaatttcacccgcacaatgcagaacagcgtcaatcttgttttcttccaagtaagtttttaaggcattagcatcataaacatccagttgtttaaagctagcacgactatctacagccgctcgatttcctgtagagagattatctagaacatgtacctgatagctagcatttaaaagagctttaacggtatgggagccaatgtagccagctccacctgtaacaagaattgttttggtcatgattttttcctttttctagttttgtactattttaaagaaataagaaggagaagtcaactattttctgcaaattttatgaaaaatctgaacgattttggcatcggattgtttttttgtttgggaataaaatttcgagtgaatcttggaattttttagattttacttcaaatgcaagagaatacaattcatttctaagatagagcaaaactaagatactaacttagaaatccaccttcccgctatccttctcctataaaaagtggtaaaatggatgaaagaaagaaggaactgaaatgacaacattattttcaaaaatcaaagaagtaacagaacttgctgcgatctcaggtcatgaagcgcctgtccgtgcttatcttcgtgaaaagttgacaccacacgtggatgaagtggtgacagatggcttgggtggtattttcgggattaaacattcagaagctgcggatgcaccgcgcgtcttggtcgcttctcacatggatgaagttggttttatggtcagcgaaatcaagccagatggtacttttcgtgtcgtagaaatcggtggttggaatcctatggtggttagcagccaacgtttcaaactcctgactcgtgacggtcgtgaaattcctgtgatttcgggttctgtccctccacatttgactcgcggaaagggtggaccaactatgccagctattgcagatatcgtctttgatggcggttttgcggacaaggctgaggctgaaagctttggtatccgtcctggcgacaccatcgtaccagatagttctgcaatcttgacagccaatgaaaaaaatatcatctcaaaagcttgggacaaccgctacggtgttcttatggtgagtgagctagcagaagccctttcaggtcaaaaactcggaaatgaactctatcttggctctaacgtccaagaagaagttggtcttcgtggtgctcatacttccacaactaagtttgacccagaagttttcctagcagttgactgctcacctgctggtgatgtttatggcggtcaaggcaagattggggatggaaccttgattcgtttctacgacccaagccacttgcttctcccaggaatgaacgatttccttttgacaacggctgaagaagctggtatcaagtaccaatactactgtggtaaaggcggaacagacgctggcgcagctcatctgaaaaatggtggtgtcccatctacaacaatcggtgtttgcgctcgttatatccattctcatcaaaccctctacgctatggatgacttcttagaagcgcaagctttcttgcaagccttggtgaaaaaattggatcgttcaacggttgatttgattaaaaattattaaatcataagggaggtggtagggatggtagaaccaaacctagaaagccttgtaaaagatctttacaatcatgctcgacatgatttgagtgaggatttagttgctgctctcctagagactgctaaaaaactgcctactacaaatgagcaattgctggcagttcgtctctcaggcctggtcaatcgtgaattgctcaagaatcccagacatccggcaccctgagttgctcaacttggctcgctttatcaaaagagaagaagctaagtacagaggacccgcagcttctgcgcttatgtacggggagctctttaaaatgctttgattccattgtgaatcaaagcatttttctatatggtagaagaataattcttgattaggagaagaagaagccatcctattcaggatagcttcttggttcttagatttgttcagcaatgaccttttcagctagattcatagcatggtctgatacacgagtgtagtgggaaacaatatcgataaagttgaccccagcttgcgttgaacactcgcccttgttgaggcgtttgatgtgagtctttctgagaacacgttccatattgttgatttctttatggcgttcaattagactttgagctttttcaatgtcgttgttttccacgctatcaagggcatccttgataaagccagtggttttttgatagatatcagctagttcttgcaaagcagcttcagagaactcaacatttttacgtcgaagatagtcagtcagattgattagggcctcagcgtgatccccaatccgttccaaatcacgggatgaatcaaggatgttggtcagcacttcactttctttctggctaagggcttcacttgaaagagtaataaggtaacgagtcaatttttcatcaatggtattgatggcttcttccgtcttgtggcctttttcagcaaccttttcattgaggtcaatgatgtagttgtatgaaaggtcaaaggctttagaagcataatttcccaagtgaaggagttcttttttggcatttccgagagcgattgatggagcttgtttaatcaaatgctcatcaagataaagtggctcgtacttgacaacttcatcttcaccagggatgagcttggttacaaagtaggccaaggctccgatgaatggaaattgtacaatggtgttacttacgttaaaggcaccgtgagagaaggcgatggtcatctcaggtgagaggtgaaggagtgcctggaagtactcaatcatagatgtaaatggacctaataagattaagcaaagaatggttcctaaaacgttaaaggtaacgtgggttgcagcaacgcgtttcgcagagacattggctccagctgccgcgatgataactgttagggttgtcccgatattatccccgaagagaactggtagcgaacctttaaggtcaaggaatccacctgcatagagaccttgcaaaatcccgatcgtcgcagaagaagcttggatgaggacggtaatcactgcaccggcaaaaactcccaacacaggattttgtcccaaggttaccatgtattccttgaattgtggtaaatctttaagagggctcataccggcactgatgaggttgagggcgtagaagattccccccacaccaaacaggatgcgcccgatattgtttgctgttctgttttttgtaaagaagaggaacatggtcccaaggaaaatcaggggcaaagcatactcgccaagcttgaaaccgatgataaaggaagtaacggtagttccgatattggctcccatgataattccgatagcctgtctaagagtgagaagactagcgctgaccagcccaaccgtgataactgtaacccctgtacttgactgaatcagggcagtcacgacaattccgactagaacacctaaaaagggattgctagtgtacttgtcaatgtaaaaacgaaggcgatctccagcagcttgttgcaaaccgtctcccatggtcttgatgctatataagaatagtcccagaccacctaaaaagtgaaataaaatttcctgccaattaatggacatttctttttcctccgaaaaataataacggaatttctcctattctattttaaaggataaaagtaaatctaacaagtgttaagctaagattttagaaagaaaattcgttagaatgggccttaattatattaattttaccaatttctaacctagatatagatatttccttttatatattgacatttaaaagaaatattttaaaatgagggaggaattatcttggtccctgtgattgggataaaaattttataaagaaagttaagcgctttcttttgtgcaacaaaatcaatcttttaggaggagaaaatgaagaatctattttttgaaagacgttgtcgttacagtattcgtaagttatcagtaggagcctgctcgctgatgattggggctgttttatttgctggtccagccttagcagaagaaactgcagttcctgaaaataacggagccaatacagagcttgtttcaggagagagtgagcatccaactaatgaagctgacaagcagcatgaaggagaacatgctagagaaaataagccagaaaaggcagaaggagtagcgacagcatctgaaactgcttcgccagcaagcaatgaagctgcaactactgaaactgcagaggcagtaagcgtagctaaaccagaggaaaaaccaagtgaggtggctgcggaaacaccatctgcagaagcaaaacctaagtctgacaaggaaatagaagcaaagcctgaagcaactagccaaggggatgagtctaagccagcagcagaagctaataagactgaaaaagaagtccagccagatgtccctaaaaatacagaaaaaacattaaaaccaaaggaaatcaaatttaattcttgggaagaattgttaaaatgggaaccaggtgctcgtgaagatgatgctattaaccgcgggtctgtcgccctcgcttcacgtcggacaggtcatttggtcaatgaaaaagctagcaaggaagcaaaagttcaagccctatcaaacaccaattctaaagcaaaagaccatgcttctgttggtggagaagagttcaaggcctatgcttttgactattggcaatatctagattcaatggtcttctgggaaggtctcgtaccaactcctgacgttattgatgcaggtcaccgtaacggggttcctgtatatggtacactcttcttcaactggtctaatagtattgctgatcaagaaaaattcgctgaagctttgaagcaagacccagatggtagcttcccaattgcccgtaaattggtagatatggccaagtattatggctatgatggctatttcatcaaccaggaaacaactggggatttggttgaacctcttggagaaaagatgcgccagtttatgctctataccaaggagtatgctgctaaggtaaaccatccaatcaagtattcttggtacgatgctatgacctataactatggacgttaccaccaagatggtttgggagaatacaactaccaattcatgcaacctgaaggagataaggttccagcagacaacttctttgctaactttaactgggataaggctaagaatgattacactattgcaactgccaactggattggtcgtaatccttatgatgtatttgcaggtttggaattgcaacagggtggttcctacaagaccaaggtcaaatggaatgacattttagatgaaaatgggaaattgcgtctgtctcttggtttgtttgccccagataccattacaagtttaggaaaaactggtgaagattatcataaaaatgaagatatcttctttacaggttaccaaggtgaccctactggtcaaaaaccaggtgacaaagattggtatggtattgctaacctagttgcagaccgcacgccagcagtaggtcatacctttactacttcctttaatacaggtcatggtagaaaatggttcgtagacggtaaggtttctaaggattctgagtggaattaccgttcagtttcaggtgttcttccaacatggcgctggtggcaaaaatcaactggtgataagttgaaagcaagctatgattttgaagatgcttataatggtggaacttctctcaaatttgcaggggatctttcaggtgcgaccaagcaagatgtgaatttgtactctactcgcttgaaggtgacagatacaactaaattgcatgttgcccacaaaggaggcaaagggaccaaggtttatgtagaatttgcaaccaagaaagattatacctacggtgatgaagctgcccgtaaagaattgacagtttcagataactggactaccgatgattttgatttgagtgccttagcaggtaaaacaatttacggtattaaactctattttgaaaatgacaaagacttaaaaggttatcaatttaacctggggcaattgaccatcagcaataatcaagatgctcctcaggcaccaaccacagttgctgtagccaaacaagtccttaaaaatgcccaagaagcggaagcagttgtgcaatttaaaggcaacaaggatgcagatttctatgaagtttacgaaaaagatggagacagctggaaattactaactggctcatcttctacaactatttatctaccaaaagttagccgctcagcaagtgctcaaggtacaactcaagaactgaaggttgtagcagtcggtaaaaatggagttcgttcagaagctgcaactacaacctttgattggggcatgactgtaaaagataccagcctaccaaaaccactagctgaaaatatcgttccaggtgcaacagttattgatagtactttccctaagactgaaggtggagaaggtattgaaggtatgttgaatggtaccattaccagtctttcagacaagtggtcttctggacagttaagcggtagtgtggatattcgtttgacccagccacgtacagttgttagatgggtgatggaccatgctggagctggtggagaatctgtaaacgatggtttgatgaacaccaaagactttgacctctattataaagatgcggatggtcaatggaagttggctaaggaagttcgtggcaataaagcccatgttacagatattacccttgacaaacctatcacagctcaagattggcgcttgaatgttgtcacttctgacaatggaactccatggaaggctattcgtatctataactggaaaatgtatgaaaagcttgatactgagagtgtcaatattccgatggccaaggctgcagcccgttctctaggcaataacaaggtacaagttggctttgcggatgtaccagctggagcaaccattaccgtttatgataatccaaattctcaaactccgcttgcaaccttgaagagcgaagttggaggagacctagcaagtgcaccattggatttgacaaatcaatctggtcttctttactatcgtacccagttgccaggcaaggaaattagtaatatcctagcagtttccgttccaaaagatgacagaagaatcaagtcagtcagcctagaaacaggacctaagaaaacaagctacgccgaaggggaggatttggaccttagaggtggtgttcttcgagttcagtatgaaggtggagctgaggacgaacttattcgcctaactcacgcgggtgtatcagtatcaggttttgatacgcatcataagggagaacaaaatcttactttacaatatttgggacaaccggtacatgctaatttatcagtgactgttactagtcaagatgaagcaagtccgaaaactattttgggaattgaagtaagtcaggaaccgaaaaaagattacctagttggtgatagcttagacttgtctgaaggacgctttgcagtggcttatagcaatgacaccatggaagaacattcctttactgatgagggagttgaaatttctggttacgatgctcaaaagaccggtcgtcaaaccttgactcttcgttaccaaggtcataaagtcaactttgatgttttggtatctccaaaagcagcattgaacgatgagtaccttaaacaaaaattagcagaagttgaagcggctaagaacaaggtggtctataactttgcttcaccagaagtaaaagaagccttcttgaaagcaattgaagcggctgaacaagtgttgaaagaccatgaaactagcacccaagatcaggtgaatgatcgtctcaataaattgacagaagctcataaagctctgaatggtcaagagaaatttacggaagaaaagacagaacttgatcgcttaacaggtgaggctcaagaactcttggctgccaaaccaaaccatccttcaggttctgccctagctccgcttcttgagaaaaataaggccttggttgaaaaagtagatttgagtccagaagagcttgcaacagcgaaacagagtctaaaagatctggttgctttattgaaagaagacaaaccagcagtcttttctgatagtaaaacaggtgtggaagtacacttctcaaataaagaaaagactgtcatcaagggcttgaaagtagaacgtgtccaagcaagtgctgaagagaagaaatactttgcaggagaagatgcccatgtctttgaaatagaaggtttggatgaaaaaggtcaagatgttgatctctcttacgcttctattgtgaaaattccaattgaaaaagataagaaagtgaagaaagtattcttcttgcctgaaggcaaagaagcagtagaattggcttttgaacaaacggatagtcatgtcatctttacagcaccacacttcacgcattatgcctttgtttatgagtctgctgaaaaaccacaacctgctaaaccagtagaaaaagttatttcaagcaaggaaccagctgaaggtgtcaagaatttggttgtggatactccgaaattagaagttgaagagacaagtattgccttcgaacaccaagaacgtcccaatccaaatcttacagtcggtcaacgtcaacttgtccaagcaggagttgaggggcaaattcgtcgtttgattgaagtagatagtcaaggcaatcgtacgcttcgagctacagaagttttgaaagaagcaagtcctgaaatcgtagaagtaggtactggtctcattcctgccaatccagcaccacaaaacacagaccttccaaaacctactaatcaactggcttctgatcaacaaaaggctcctaaattggaagttcaagaggaaaaggttgcctttgaccgtcaagagcatgaaaatgctgatatgctagttggggaacaacgagtcatcatacagggacgagatggtctattaagacatgtctttgaagttgatgaaaacggtcagcgtcgtcttcgttcaacagaagttatccaagaagcgattccagaaattgttgaaattggaacaaaagtaaaaacagagccagcagtagcgcctacacaagaaaaaccagcccaaaatacagcagttaaatcagaagaagcaagcaaacaattgccaaatacaggaacagttgatgctaatgaagccctaatagcaggcttggccagccttggtcttgctagtttagccttgaccttgaaacagaaaaaagaagatgaagattaaatatcgaaaaatcttgtgaaatctttccttatatttccaaagtgtgatataatagtttcgaataaaataaataaaggggtttttgtaacatggcaaaacttactgttaaagacgttgacttgaaaggtaaaaaagtcctcgttcgtgttgatttcaacgtaccattgaaagatggcgtaatcactaacgacaaccgtatcacagcagctcttccaactattaagtacatcatcgaacaaggtggacgtgcaattcttttctctcaccttggacgtgtaaaagaagaagctgataaagctggtaaatcacttgctcctgtagcagcagacttggcagcaaaacttggccaagacgttgttttcccaggtgtaactcgtggtgctgaattggaagcagctatcaacgctcttgaagatggacaagttctcttggttgaaaacactcgttacgaagatgttgacggcaagaaagaatctaaaaacgatcctgaacttggtaaatactgggcatcacttggagatggtatcttcgtaaacgatgcattcggtacagctcaccgtgcacacgcatctaacgttggtatctcagcaaacgttgaaaaagcagttgctggtttccttcttgaaaacgaaattgcctacatccaagaagcagttgaagctccagaacgtccattcgtagctatccttggtggttcaaaagtttcagacaagatcggtgttatcgaaaacttgcttgaaaaagctgataaagttcttatcggtggtggtatgacttacacattctacaaagcacaaggtatcgaaatcggtaactcacttgtagaagaagacaaagtggatgttgcgaaagctcttcttgaaaaagcaaacggtaaattgatcttgccagttgactcaaaagaagctaacgcatttgctggttacactgaagtgaaagacactgaaggtgaagcagtggatccaggcttccttggtcttgacatcggtccaaaatctatcgctaaatttgatgaagctttgactggtgcgaaaacagttgtatggaacggacctatgggtgtatttgaaaacccagacttccaagctggaacaatcggtgtgatggacgctatcgtgaaacaactaggcgttaaatcaatcatcggtggtggtgactcagctgccgcagcgatcaaccttggacgtgcagacaaattctcatggattagtacgggcggaggtgcttcaatggaacttctcgaaggtaaagtattgccaggtttggctgcacttacagaaaaataagattttataaacaatcaaagaagagaggaatgaaagttcctcttttcttttgcttaaaataaaaacgcttcctctcaactattactcataaaaatcaccgatttatgataaaatggaaatagaaagttgagattatgagttattttaaaaaatataaattcgataaatcccagttcaaacttggtatgcgaacctttaaaacaggtattgctgtttttctagttctcttgatttttggcttttttggctggaaaggtcttcaaatcggtgctttgacagcggtttttagtctgagggagagctttgataagagtgtccattttgggacttcgcgtattttaggaaatagtatcggtggcctctatgctttggtcttcttcttattaaatacctttttccacgaagccttttgggtgaccttggtagttgttccaatctgcaccatgttaaccattatgacaaacgtagccatgaataacaaagcaggggttattggtggtgtagcagctatgttaatcattaccctatcgattccgagtggagagacaattttgtacgtatttgcgcgtgtatcagaaactttcatgggagtttttgtcgcaattctcgtaaattacgatattgatcgtattcggctctttttagagaaaaaagaaaaataatgttacattttataacattatcaattgacgtttgtctttttttagactataatagacagaaagaaggaaattgtaaatgaaggaaaaagaatttcgccgaaatatggctgtttttcctatcggcagtgttatgaagttgaccgatctatcggcgcgtcagattcgttattatgaagatcaagagttgattaagcctgatcgaaacgaagggaaccgtcgcatgtattccttgaatgacatggatcgtctgcttgaaatcaaagattatatctccgaaggttataatatcgctgccattaagaaaaaatatgctgaacgtgaagcgaaatccaagaaagcggtgagtcagactgaggtgcgtcgtgcacttcataatgaactcctccaacagggtcgctttgcttcagtacagtcaccttttggtcgcggttaggcaaccgcaagtagtcatacattaaggagaaaactcatgccaatcacagctgcagatattcgtcgtgaagtcaaggaaaaaaatgttacctttattcgtctcatgttctcagatattttgggaaccatgaaaaacgtcgaaattcctgctacagatgaacagttagataaagtcttgtcgaacaaggctatgtttgatggatcttctattgaaggttttgtacgtatcaatgagtcagatatgtacttgtacccagacttggatacatggacagtcttcccttggggagatgaaaatggaagtgttgcaggtttgatctgtgatgtctatacaacagaaggtgaaccatttgcaggagaccctcgtggcaatttgaaacgtgctcttcgtcacatggaagaagtaggattcaagtccttcaaccttgggccagaaccagaattcttcctatttaaactggatgaaaatggggatccaacacttgaagtaaatgacaagggtggctactttgatttggcacctactgaccttgcggacaatacacgtcgtgagattgtgaatgtcttgaccaaaatgggatttgaagtagaagcgagtcaccacgaggttgcggttggacagcatgagattgacttcaagtacgatgaagttctccgtgcttgtgataagattcaaatctttaaacttgttgttaaaaccattgctcgcaaacatgggctttacgcaacctttatggctaaaccaaaatttggtattgctggatcaggtatgcactgtaatatgtccttgtttgatgaagaaggaaacaatgccttctttgatccaaatgatccaaaaggaatgcagttgtcagaaacggcctaccatttccttggcggtttgattaagcatgcctacaactatactgccatcatgaacccaacagttaactcatacaaacgtttggttcctggttatgaagcacctgtttacattgcttgggctggtcgtaaccgttcgccacttgtgcgcgtgcctgcttcacgtggtatgggaacccgtcttgagttgcgttcagtggatccaatggcaaacccttacatcgctatggctgttcttttggaagttggtttacatggtattgaaaacaaaatcgaagcaccagctcctatcgaagaaaatatctacatcatgacagcagaagagcgtaaggaagctggtattacagaccttccatcaacccttcacaacgctttgaaagctttgacagaagatgaagttgtcatagcggctctcggagaacatatctatactagtttccttgaagccaaacgaatcgaatgggcaagttatgcaaccttcgtttcacaatgggaaattgataattatttagacctttactaatactaatatagaaggaagattgtccgtgaggataatctttttttcttgtattttatatcgaggtgtgatatattttatataacgaagtgcgatatatcgaactggataggaggtagctataaatggaattaacggataagattcgtcgagtttatcttccgatgacggaaacgggcttttatatcttgttctgtctgcaaaaggaaggtcatgggtacagtattacgcaaaaggtcaaggagatgacagatttgcaagtttcgattagtcctggaactatgtatggaaccttgtcaaaaatggaaaaggatggtttgatttcctttgtccgagaagaggagaagcgtaaaatctatcagattacagacttgggaagaaaagtcttagatattgaattgaaacgtattgaacggctctatagaaacagtctggaggaaagatgatggaaaagaaggttgtttatagaattgctaccattgcggattatgatagagaggctttatatcttagaaaaatgcatgctgagggctggaaactcaaggaagtgacctactctaacttagtagttgcggttaagtatacttttgaaaagtgccaaccggagcaggtgtcttatcagttggacttttatcctatgaaaaaatcagagagagcctcctatttacaattatttaaagactgtggatgggagcatattacagactttaatggtttttcctactttagaaagcttcattctggaattgagttggatgccgagtttgaaatttataatgacgcggccgggaagctagctatggtcaaacggattttaacgaggcggatgcttcctattttgcttctctttttagctctactaccggttttctcaaagtttgtcactggaggtagttctttcagttgggaaatgtttttgattgttataatagatggtgttttattgatagttcattcgattcagatgtcttatattttttggagattgtttcaaaagtggaaagaattatctgataaataaaaccatgcatgttttctaatttggaggtgcgatgatgaaaagcaaactacaatttcggatttttacgattcttgatgaggataagaaagaagaatatttacatgagatgcacttgaaaggttggaggtatagaacgagtcgttttggttttttctattttgaccaatgtcaaccagacgatgtcatctaccgtatctatgattctagatttcttaaaaaatataagcatgaactgcaagattttagaaatagaggttgggaattgatagaaagaggtttttattcaatttttcgtaaaccggcttctaatatacttccagaggatcaagtctatatgagtaaggggctcagatgggaagttatgcgatatagatttcgttcatgtgcagctactttcttaggtggtcttgttgtttgtatgagtttgtttcgagaagaactgtcgcaatctttctttgtcatttttgctctatatgcctttatgatttcttatttaattcatggctatttaaggcttaaaagggcataccgagtagataaacagtaaggttctaggtctttagactgatttttagcactcttggcaaaagagtgctaattttttgagtttttgtcttgacattctcttttaagggtgtataatagaatcataagttagcacttgagtgtatcgagtgctaatcgatcagacagagaggagtgatgaggtggttacagagcgtcagcaggatattttaaatctgattattgacatctttaccaaaacgcacgaacctgtcggatccaaagccttgcaagagtctattaactctagcagtgcaaccattcgtaatgacatggcggctctagaaaagcaagggttgcttgagaaggcccatacttcaagtggtcggatgccaagtgttgctggttttcagtactatgtgaaacactcactggattttgaccgactagctgaaaatgaggtatatgagattgtcaaagcctttgatcaggaattcttcaaattggaggatattctgcaagaggctgctaacctgctgacagacttgagtggctgtacggtagtagcactggatgttgagccgagcaggcaacgtttgacagcctttgatatcgttgttttggggcaacatacagccttggcggtattcaccctagacgagtctcgaacggttaccagtcagtttctgattccaaggaactttttgcaggaggatttgctgaagctgaagagcatcattcaggaacgtttcctcggccacaccgttctagatattcactacaagattcggacggagattccgcagattatccagcgttactttacaacaacggacaatgttatcgatctctttgaacatatctttaaggaaatgttcaacgaaaacattgtggtggcgggcaaagtcaatctcttgaattttgccaatctggcagcttatcagttctttgaccaaccgcaaaaggtggctctggagattcgtgagggtctgcgtgaagatcagatgcaaaacgttcgtgttgcagacagtcaagagtcctgtctagccgacctagcggtgattagtagcaagttcctcattccttatcggggagttggaattctagccattatcggtccagttaatctggattatcagcaattaatcaaccaagtcaatgtagtcaatcgtgttttgaccatgaagttgacagatttttaccgctacctcagcagtaatcattacgaagtacattaagattgaaatcattaaaggaggcgaaaatggcccaagatataaaaaatgaagaagtagaagaagttcaagaagaggaagttgtggaaacggtagaagaaacaactcctgagaagtctgaattggacttggcaaatgaacgtgcagatgagttcgaaaataaatatcttcgcgctcatgcagaaatgcaaaatatccaacgccgtgccaatgaagagcgtcaaaatttgcaacgttatcgtagccaggacttggcaaaagcgattctcccttctttggacaaccttgagcgtgcactcgcagttgaaggtttgacagatgatgtgaagaagggcttggaaatggtgcaagaaagcttgattcacgctttgaaagaagaaggaatcgaagaaatcgcagctgacggtgaatttgaccataactatcatatggccatccaaactcttccagcagacgatgaacacccagcagataccatcgctcaagttttccaaaaaggctacaaactccatgaccgcatcctacgcccagccatggtagttgtttacaactaggagagagcgcttaaaaaccttgtccgaaacgacaataaactatgaagaaagataagaggcaagccggaggcttgcaaggaagatatttcccaccgtggtgaaagtttcagtagcaaaagctactgaaacaggggatttttgagacaataggctcaaaaataagtgatgaaatcccgtagggagttgctcacgtccccaccacttaagggaaatataaaaaaatagaaaattaactaacaaggagaaaaacacatgtctaaaattatcggtattgacttaggtacaacaaactcagcagttgcagttcttgaaggaactgaaagcaaaatcatcgcaaacccagaaggaaaccgtacaactccatctgtagtctcattcaaaaacggtgaaatcatcgttggtgatgctgcaaaacgtcaagcagttacaaatccagatacagttatctctatcaaatctaaaatgggaacttctgaaaaagtttctgctaacggaaaagaatacactccacaagaaatctcagctatgattcttcaatacttgaaaggttatgctgaagactaccttggtgaaaaagtaaccaaagcagttatcacagttcctgcttacttcaacgacgctcaacgtcaagccacaaaagacgctggtaaaatcgctggtcttgaagtagaacgtatcgtcaacgaaccaactgcagcagctcttgcttatggtttggacaagactgacaaagaagaaaaaatcttggtatttgaccttggtggtggtacattcgacgtctctatccttgaattgggtgacggtgtcttcgacgtattgtcaactgcaggggacaacaaactcggtggtgatgactttgaccaaaaaattatcgaccacttggtagcagaattcaagaaagaaaacggtattgacttgtctactgacaagatggcaatgcaacgtttgaaagatgcagctgaaaaagctaagaaagacctttctggtgtaacttcaactcaaatcagcttgccatttatcactgctggtgaagctggacctcttcacttggaaatgactttgactcgtgcaaaatttgacgatttgactcgtgaccttgtagaacgtacaaaagttccagttcgtcaagccctttctgatgcaggtttgagcttgtcagaaatcgacgaagttatccttgttggtggttcaactcgtatccctgccgttgttgaagctgttaaggctgaaactggtaaagaaccaaacaaatcagtaaaccctgatgaagtagttgctatgggtgctgccatccaaggtggtgtgattactggtgatgttaaagacgttgtccttcttgacgtaacaccattgtcacttggtatcgaaacaatgggtggagtatttacaaaacttatcgatcgcaacactactattccaacatctaaatcacaagtcttctcaactgcagcagacaaccaaccagccgttgatatccacgttcttcaaggtgaacgcccaatggcagcagataacaagactcttggacgcttccaattgacagatattccagctgcacctcgtggaattcctcaaatcgaagtaactttcgacatcgacaagaatggtatcgtgtctgttaaggccaaagatcttggaactcaaaaagaacaaactattgtgatccaatcaaactcaggtttgactgacgaagaaatcgaccgcatgatgaaagatgcagaagctaacgctgaagcagataagaaacgtaaggaagaagttgaccttcgtaacgaagtagaccaagcaatctttgcgactgaaaagacaatcaaggaaactgaaggcaaaggcttcgacgcagaacgtgacgctgcccaagctgcccttgatgaccttaagaaagcgcaagaagacaataacttggacgacatgaaagcaaaacttgaagcattgaacgaaaaagctcaaggccttgctgttaaactctacgaacaagctgcagcagcgcaacaagctcaagcaggagcagaaggggcgcaagcaacaggaaacgcaggcgatgacgtcgtagacggagagtttacggagaagtaagatgagtgtattggatgaagagtatctaaaaaatacacgaaaagtttataatgatttttgtaataaagctgatagttatgaatctgcaaaagattttatagataatattccagtagtgtatttggctaggtataaagcaattattttagctgagcatgaaagttgtgttaaaaatgatgaggcggtaaggaattttgttacttcagtattgttgtcagcgctagtatcagcactagtatcagcaaccatacaaaaaccagaatttataatatcgtttataattggcatggtttgggttgtctgtgttttccttctaatctattggaattttatagccaatactaagaagagacaaaaatatataaatgtttgtgtgcttattggatatttaaaatcaaaataaatttgatttaagttacttcactcatccacagaggttgcaatccagcctctgtttttcgataaaatagaggatgttgcgtatgaaaaaagtactttgtatcatttatcctaatttttctctttatgagataaccactttaacgagtactttagctctgtcttttgatatcacgattgattatgtcgcttctgagaattcgatggtagtctctgaggatggtttgccctgtcaaccgacgaaaacattggatcagctctgtatagaagattattcttgtgtaattttgccaggaatggtcaatataggtcctgctctacaagatgagaaattgatttcgtttttgagaagtcttaatgagcaagatatcctaattgcagccatttcttcagcgcccattttactagcgaaagctggcttgttgaacgacacgaaatttacaggtggaatttggcaaaacttctttgattattttgaatttcttccacgtaagaattttcaaccgaaagttcttgtccaagataaacaaatcattacggctatcggttttgcacatcaagagtttgcaagaaaagtgattttcggtttagggttggcagagaatacggacaactattttaaagaacagaacgagtatgctgaagaggatttgatatttactctatcagatgaagagtttaatcaagtgaagcagagtatagaaaacagcctctaaagatttacatgaaaattatagaaaggaacaaaggtgttcagggaattgaacacgggttcccaaatttattactcaatataaaagaaaggaattgaacccgacctaaattctcggaaaaaagataaatctgcctaggagcatcgctccagcgtcagatttcctatttttcagtcgaattttacggtcttggtatcttgtatgaacaatactgaattttatgatcgtctgggggtgtcaaaaaacgcttcggcagacgagatcaaaaaggcttatcgtaagctttcgaaaaaatatcacccagatatcaataaggagcctggtgctgaggaaaagtacaaggaagttcaggaagcttatgagactttgagtgacgaccaaaaacgtgctgcctatgaccaatacggtgctgctggagccaacggtggttttggtggagctggtggtttcggcggtttcgatggggcaggaggcttcggtggttttgaggatattttctcaagtttcttcggcggaggcggtgcttcgcgcaatccaaatgctcctcgtcagggggatgacctccaataccgtgtgaatttgacctttgaagaagctatttttggagctgaaaaagaggttaagtacaatcgtgaagcaagctgtagtacatgtaatggctcaggcgctaaaccaggaacaagtccagtcacttgtggacgctgtcatggcgctggtgttattaacgtcgatacgcagactccgcttggtatgatgcgtcgccaagtaacctgtgacgtctgtcatggtcgcggaaaagaaatcaaagatccatgtaccacttgtcacggaacaggtcatgaaaaacaagcccatagtgtacatgtaaaaatccctgctggtgtggaaactggtcaacaaattcgcctagcaggccaaggtgaagctggatttaacggtggaccttatggtgacttgtatgtagtggtttctgtggaagccagcgataagtttgaacgtgaaggaaccactatcttctataatctgaaccttaactttgtccaagcagctcttggtgatacagttgatatcccaacggttcacggtgatgttgaattggttatcccagagggaactcagactggtaagaaattccgtctacgtggaaaaggagctccgagccttcgtggtggtgcagttggtgaccaatatgttaccgttaatgtcgtaacaccgacaggtttgaacgaacgccaaaaagcagcgcttaaagaattcgcagctgctggtgatttaaaagtcaatccaaagaaaaaaggcttctttgaccatattaaagatgcctttgaaggagaataaaacaaaaagagccgttgggctcttttttgtttatagattttttaagactttccttaagtaatgacggacggtagcgaccttcttcgaagttccatacctaaactttgagcctaggtctcaaagtttccgaacatctgaaagcaagctgtttcagatgttttcattccgtcggaaagtcttggatttagttgtgaaatggtgaatgagttgcctaaattatgatgtataattaatgggatataacttgtttaccttttaaaaaagagccgtcgggctctttttacttatcttcagtttcctgcagttcttttatcacagctagtctagtctggatatctttttccaagaccttaaacttgtaagttaggtcttcttgatattccttgatgagttctttttgctggtcgatgatttgcaggctattttggataatatccacatcatccttgatagcttgaacacggtcagtggtattcaagacttcatctgtgatggtttggcgattttttgtgaccagataacttccggctgcagctcctgcaaatagcagtaggttggataatttcatggcaactccttaggcgtttttgatagtttcagcgacttgagcaagtttgtcaaagtctggttcgtgggcgataaaatcaatcttgaggtcatcgtccgcactgtagcgaggcacgagatgaacgtgggtatgaaagactgtttgaccaccgatttcttcacagttggcaatgatattcataccagcagccttggtagctttcatgactttttgagctacttttggtacttgggcaaagagttggctggcgctagtagcatccatttctaaaagattgcgatagtgttcctttggcacgaccaaggtgtgtcctggtgtcacttgagagatatcaagaaaggcaagaacctgctcatcttcatatacttttgatgcaggaatttcccctgcgatgattttacaaaaaatgcaatctgacataaaatctacctctactgtattgaattttgatataatatagctacattataccagatttggagaaaatatgttagaaattaaaaacctgacaggtggctatgtccatgtccctgtcttgaaagatgtgtcctttacagttgaaagtgggcagttagtcggtttgatcggtctcaatggtgctgggaaatcgacgaccatcaatgaaattatcggtctgttgacaccttatagcggatctatcaatatcaatggcttgaccctgcaagaagatgcgaccaactaccgcaaacagattggttacattcctgagacacccagtctgtatgaggaattaaccctcagagagcatatcgaaacggttgctatggcttatggtatcgagcaaaaagtggcttttgaacgagtagaacccttgttaaaaatgtttcgtctggaccagaaattagactggttccctgttcatttttcaaaagggatgaagcagaaggttatgattatctgtgcttttgtggtggatccaagtctctttatcgtggatgagcctttccttggtcttgatccgctggcgattgcggacttgattcagcttttgaaagtggaaaagcaaaagggcaagtccattctcatgagtacccacgttctggattcggcggagaagatgtgtgatgcctttgtcattctccacaagggggaggtgcgtgctcatgggaacctccagcaactccgcgaagcctttaacatgcctgaggctagtttgaatgatatttacttggctctgaccaaagaggaggagttatgaaagacttgtttttaaagagaaagcaggcttttcgtaaggagtgtcttggttatctgcgctatgttctcaatgatcactttgtcttgttcctgcttgtcctgctgggatttctagcctaccagtacagtcaactcttacaacattttcctgaaaatcattggcctatccttttgtttgtagggattacatctattttacttttgctttggggtgggattgtcacttatatggaggcaccagacaagctctttctcttggtcggagaagaggaaatcaagctccatctaaagcgtcaaattgccacttccctagtcttttggctctttgtacaaacccttttcttgcttttatttgcgcccttatttttggcaatgggttctggcttgccagtttttctggtctatgtgctcctattgggggtagggaaatatctgctctttcgtcaaaaagccagcaaatttttcactgaaactggactggactgggactatgtcatttcccaagaaagcaagcgtaagcaagtcttgcttcgtttctttgctctctttacgcaggtcaagggaatttcaaacagcattaagcgtcgtgcctatctggactttatcctaaaggttgttcagaaggtgcctgggaagatttggcaaaatctctatctgcgttcttatctgcgaaatggagacctctttgccctcagtctccgtctgctcctactttccttgctggcgcaggtctttatcgagcaagcttggatagcgacagcagtggtggttctctttaactacctcttgctcttccagttgctggccctctatcatgcctttgactaccagtatttgacccaactctttccactggacaaggggcaaaaggaaaaaggcttgcaggcggtagtccgaggattgaccagtttggtcttagtagtggaattagttgttgggttgattaccttccaagaaaaactagcccttctagccttactgggagctggtttggttttactagtcttgtacctaccttatcaggtcaaacgtcagatgcaggactaacattgtctatatgacactaaaaaagaagttgagttcagtttgtctcagcttcttttattttctacaagagaatggttggaccgtagagacttaacttggtcttgacttggtcaaagtggaagcggtcataggcccgccaagcggcgcgagttggagcatctggatcaagagcgctgagtcccatgagaagactggaagtctggtaaaatttttccagttcaatcaagactcgattatccactgtttcagccttggctagaaaaccaagaatagagtttaattgctcctgaaagcggacgtcgtcagcggttgcctgtttgcatgcttgataggctttgtttaagtcagtaatcaaagtctgagctcttttgatagggtctgtatctgtcatgagaattcctcctttaatctaggtgctagttttgattctagcaactgtgttttgatactgttagtctatcacttttatctcctttttcaccataaaatctttaattgcccttgaaatttcctgaatgatactgttaagattttatgataaaatagttgtaagattatcatgcttatttgaggaacaagatacccttcaggagcgttaaaggcctgtttaggatttggtgggcttgtatcaaagtatttttgctattctctttttaggaagaaatcgaaacaaggagagtaagaagatgagaatatttgttttagaagatgatttttcccaacagactaggattgaaacgacgattgagaaactcttgaaagaacatcatatcactcctagctcttttgaagtctttgggaaagcagaccaactgctggcagaggtgcatgagaagggggcgcatcagctattctttttggatattgagattcgaaatgaggagatgaagggtctggaagtggctagaaagattcgggatcgggatccttatgccctgattgtctttgtgacgactcactcggagtttatgcccctgtcctttcgctaccaagtgtctgctttggactacattgataaggctttgtcagcagaggagtttgaatctcggatcgagacagccctcctctatgccaatagtcaagatagtaagagtctagcggaagattgcttttactttaaatcaaaatttgcccaattccagtatccttttaaagagatttactatctcgaaacgtcgcccagagcccatcgtgttattctctataccaagacggacagactggaatttacagcgagtttagaggagattctcaagcaggagcctcgtctcctgcagtgccatcgctcttttctcatcaatcctgccaatgtgatacatttggataagaaagaaaaactccttttcttccccaatgggagaagttgcctgatcgcgcgttataaggtcagggaagtgtctgaggctatcaataacttacacttagtgaggtgatggaatggaaatagtttggaaaatagtttatacatttttggtatctggattggagttgtttatattttttaaggtagatggaattggtctcacttttgagaggatttttaaggcctttctttttaagatactgttggcatttgtttttgtaacaattaactatatagtaggaaatgattacctatcttattttacggaaccattgtacggtatcggcttatctttcttattgtttagagggcttcctaaaaaactccttatcttttatggtctctttccaatgatattggtaaatctcttttatagaggtgtttcctattttttgcttccgtttttagagcaagggcaactatataatgactactcatttacttggttatgtataataattttcaatttcttcatttctctagcctttttgagatggttagactatgatttcactagcttgagaagggagagtatagataaagattttcaaaaatccctgactacgattaactggataatgggggcttactttctagtcatggaaactttgtctttctttgaatatgaacaagttatccaatcaaagactgttcgccattttattctagtgttttacctactcttttttatggggattgtcaagaagctagatacctatttgaaggacaaacttcatgagagattggacaaagagaaggccttgcgctacagagatatggagcggtatagtcggcatatagaggaactttacaaggaagtccggagttttcgccatgactacaccaaccttttgaccagtttacgtctgggcattgaagaggaggatatggagcagataaaagaggtctacgactcggtcttaaaggattctagtgaaaaattgcaggacaacaaatatgacctgggcagattggtgaatattcgggaccgtgccctcaaaagtctcctcgcgggaaaatttctaaaagccagagataagaagattgtctttaatgtcgaagttcctgaggagattcaagttgagggaatgagcttgcttgactttctaaccattgtgtctattctttgtgacaatgccattgaagccagtgtagaggccagtcaacctcacgtttcaattgcctttttaaaaaatggagaacaagagacctttatcattgaaaactccatcaaagaagagggcatcgatatttctgaaatcttctcctttggagcaagttcaaaaggggaggagagaggtgttggtctctataccgttatgaaaattgtggaaagccatcccaataccagtctaaatactacctgtcaaaatcaagtctttcgtcaggttttaacggttcactcgatgtcagttgataattagaagatttgtgaaaaaagaattgggagaagctaacagataagttttgtctttatccagtttgatttttaccatagtatacgaggtatattaaatgaataagaaatcctattttatcgtctgttctacgttgatcatagcatcgaatcttctcatgatttccgtggtgaacaagggggaagaaacggggagcaatctgtttgtgattgctatagcctgtgttatgttaccgtcctttttatatgcggttgagaaccgactgacttctttaattgggacagagtcagtagctctactcttattgacagtattgtctttagtccgtcttgtcaacagaatagagaggacgcctgaaatcctcaacattatcattaccctcctggttttggcaggtgggacagcctgtatcctggttgcgatcatgagaatctatcataacagacggaagtaagggtgaatagctttcgatgtatttttacattgttaaatttccatagggcaagtatgtttttcatgcttgcttttttaaatttcttacaattcgagatgttttgatgaccatttgtgatttggatggaaaatgttaaaaaatagtagtatactaaccttattaaggttgtaataggacgaaagtaaaaagaggtattcctcgtgaatgcaaaaacaatgttacaattgtctattatggttgcttaacggcttaagcctgcatgtagaggagctgtacttggaggtaattatggatttcaaaagttttcttattgtttttgttgttggtatgtttgtttcttttattacttctttaattagggaaaaatttttaaaatctccaaagaagaataaagatagatctaattagataaagagatttttatcgctagtttaatctacagaggagtttctttaatattgtttcgcctgtcaaaatgatatgtgatagcaggataaaaaatctacaaattaagttggtatcaatatggtgtaaagggcaagtatgtttttcatgcttgcttttttaattttttacaattcaagatgttttgatgaccatttatgatttgagtgttccaaagataaaatgagtgctatactagcagtgtaaaggttgtagctcaactaagataaagcatacatttaggaggaaattttatgaagaaaaaaatactgattattttcgttctatatctgatcatgtctatccttctttatccgcttagggagagtacttggtatcatctattttataccatagcctatatgattgcggttgtgatctattttgctttaactaaaaagaaaggagaaaagaaatgaaaacttttcttgctaaaaaacggaacgtcttccttgcgagactgttcctaggtcagttgcccttacttgtctctacttatctatttctatctcgtcagtttttaaatttttccttggttttccaatttcttttagtggttcttaacttggcttcgattttagtcactgtttacctcactagagaaatgaggataagaaagtttgaagacgatgatttggttagtcctagaaccaatcaactcatgtatatcggcttgacaggctttatgtctattatctgtttgtatagaggtatcacagcaggagaatcctatcaacaattaattgcctatattggtgctattctctgcttgattattatgcttctactcatttggggcttgaagtattataaaaagtagaggctaatgaagtttttgttatgaatacaaaaatgatggaacaatttgaggttatggatactgagatgcttgcgaaagttgaaggaagtttcggaggttggggagatatgctttctggtttattgggtgggctagcaccttctccaattttggatcaattaaatggtaagtggcctattatacatttttcaaaaccatgtggtccttatggtatagggggaactccaaactcatgtaatggtatttaaaaaggattgaagctatgaaggcaaaatatgggaatcaaattgttgatgtttgggaaattggtcaagcaactcctaaaccaagttgggtagaggaagcttttcaaaaaaattatatggtttggttggataatcatgtgcgcattctaatggcaggtcttaacacttctcttgcaactaatatcaagtttggtctagttggaacagttggaggaggattcgctggttatggaatgtatgttcttggttatccaggtgattatatagatatcaccaatcatagagttgtttctgctaaaacatttcacaaaagttatcaaattttagaaaatgattagatatcatttaattgtaatggagaaagcaatgaaaaaaatattttttaaaaaacggaacatcttccttgcgagattgttcttaggtcagttgcccttacttgtctctacttatctgtttctatctcgtcagtttttaaatttttccgtagttctccaatttcttttagtggttattaacttggcttctattttggtcactgtttacctcactagagaaatgaggataagaaagtttgaagatgatgatttggttagtcctagaaccaatcaactcatgtatatcggcttgacaggttttatgtctattatttgtttgtatagaggtgtcacagcaggagaattctatcaacaactaatcgcatatattggtgctgttctctgcttgcttatcatgcttctactcatttggggtttgaagtattataaaaagtagaggaagggttttcttcttaatctgggactagtctaaagactggcaggaggaggttatcatgtataaacacttatttttcctagattcaaaaaccttagactggttgacaccttatattctggtcttggcttctgacaccattgcttttaatgtttttgtgctaacctttgtatctgtggtggtcttttatttcctaaatcccatgttatctttaatggctatcttcttaggggctggctatgtggtcggattttggttgctaaaatggtttgttttggaaaggttagagttaaaggatgacttgtagggaagtttgtttgttgaggaggctagttttatggagttttttgataaatttcatgccttttgttttggatttttagtactactaatcgtcattacagttccttatacgattaaccacggggatttttttcaaaatgaatctgaattgattattgtaagtcttcttgtaacctcgctgagtgttacttatgctagaaagtttgaaatggtttcttttgggatgttaagcaagaaacaacttttgcttttcattgcaatcttttttctaagcgttcttgagacgctagtttatattcatttcttcgctgtttcttctggcgcaggagttcaacacttggcggaagtcagcagaggaatttccctgtctttgattttgacttcctcagtttttggacccatccaggaggaactcattttcagaggacttcttcaaggtgcggtttttgacaattcttggttagggattgtactgacttcctctctcttttcttttatgcatggaccttctaatgtcccttcgtttattttttatctacttgggggcttgttactgggctttgcttataaaaagagccaaaacctatgggtttctactctagttcacatgttttacaatgcttggccactcttatattatttataaaaattatgaaaggtaagtagaagacggtgcttacctttttctttctataatgatacccaagccaccccagaggcttttctttgagaatcgggcgtggagcggttgacgaataggccaaaaactagtagaatagtaaggaaactttatacggaggaaagaaatggatttgggtgataatgagctaacactgactcccatacctgggaaaagtggcaaggcttatatgggtagctatcctgatgggaagcgtatctttgtaaaaatgaacacctctccaatcctacctggtctagctagagaacaaattgctccacaattattatggagtcgccgtttggcagatgggcgtgatatgtgtgctcaagaatggttgacaggcaaaatattgaccccttatgatatgaatcgtaaacaaatcgtcaatattttaacccgtcttcatcgctcacgtccgttgatgacacagttgagtcggttgggatatgccatggaaacacctgtagatttactacagtcttggcaggaaacggctccagatgctttgcgtaaaaatcattttatcagtgaagtgatggctgatttacgtcagactattccaggatttagagaggatcatgcgactattgtccatggagatgtacgacatagtaattggattgagacagacagtggcttgatttatttggtagattgggattcggttcgcttgaccgaccgcatgtttgatgtggcccatatgctctgccattatattccagaacatcagtggaaggaatggttgacctactacggttacaagtacaatcaaacggtattaaataaattgtattggtacggtcaattgtcttatttgagccagatttccaagtattatatgaaccaagatttagaaaatgtcaatcgggagattcatggcctgcgtcacttccgagacaagtatggaaagagaagatgagagttagaaatcgtaaaggggcgacagaattactagaggcaaatccccagtatgtggtcctcaatcccttgggagccaagggaaaatggcgggacctgtttggcaatgacaatcccattcatgtggaagttggaagtggaaagggtgcctttgtttcaggtatggccaagcaaaatcctgacatcaactatatcgggattgatattcaaaagtctgttttgagctacgctttggacaaggtgcttgaagttggagtgcctaacattaagctcttgtgggtagatggttctgacttgactgactactttgaagacggtgagattgatcgtttgtatctgaacttttcagatccttggcctaaaaaacgccatgaaaagcgtcgtttgacctacaaaaccttcttggataccttcaaacgtatcttgcctgaaaatggagaaattcatttcaagacggataatcgtggcttgtttgagtacagtttagtgagcttttctcagtatggcatgaagctcaatggtgtctggcttgatttacatgccagtgattttgaaggcaatgtcatgacagaatacgagcaaaaattctccaacaaggggcaagttatctaccgtgttgaggcagaattttaagaaatagcctgaaatcaggctgtataagtgcttttgctttacataagttggcaaacgtgctatactaagagtaagaatatgagaaagtgaggcggggaaatatcttcgcctcttgcttatgaggaggtggacgcaatcgcaacaatcgtagaattagtcagagaagttgtagaacctgtcatccaagcacctttcgaactcgtggatatcgagtatggaaagattggcagtgacatgattctcagtatttttgtagataaacctgaaggaattaccttgaacgacacggcagatttgacagaaataatcagtcctgtcctagacactatcaagccggatcccttcccagaacaatatttcctagaaatcaccagtccaggtttggaacgtcctttgaaaaccaaggatgcagtcgctggagctgttgggaaatacatccatgtcgggctctaccaagccatcgataagcaaaaagtctttgaaggaaccttgttggcctttgaagaggacgagttgaccatggaatatatggacaagacgcgtaagaaaactgtccaaattccatacagtttagtatcaaaagcacgtttagcagttaaattatagaaaaagaaaggatagcttttgaggattcaaaagtgaagaaaacatgagtaaagaaatgctagaggccttccgcattttggaagaagacaagggaatcaaaaaagaagatatcatcgacgcagtagtagagtcgcttcgttccgcttatcgcagacgctatggtcaatcagacagcgtagctattgactttaacgaaaaaacaggtgactttaccgtttatactgtccgtgaagtggttgatgaagtatttgatagccgtttggaaatcagcttgaaagatgctcttgccattaattcagcctatgaacttggtgacaaaatcaagtttgaagaagcacctgctgagtttggtcgtgtagcagcccaatctgccaaacaaaccatcatggaaaaaatgcgcaagcaaacacgtgccatcacttacaatacttacaaagagcatgagcaagaaatcatgtctggtacagtagaacgctttgacaaccgctttatctatgtcaacctcggtagcatcgaagcccaattgtcaaaacaagaccaaattcctggagaagtttttgcttctcatgatcgtattgaagtttatgtctacaaggttgaagacaaccctcgcggtgtcaacgtctttgttagccgtagccatccagaaatgatcaaacgcttgatggagcaagaaattccagaagtttatgacggaacggttgaaatcatgagcgtagctcgtgaagctggtgaccgtactaaggttgccgttcgcagtcataatccaaacgtggacgctatcggaacaatcgttggacgtggtggagctaacatcaagaaaatcactagcaaattccacccagctcgctacgatgccaagagcgaccgtatggtcccaatcgaagaaaatatcgacgttatcgagtgggtagcagatccagctgaatttatctacaatgccatcgctcctgctgaagttgaccaagttatctttgatgaaaacgacagcaaacgtgccttggtggttgttcctgataacaagctttctcttgccatcggtcgtcgtgggcaaaacgttcgcttggcagctcacttgactggttaccgtatcgatatcaagtctgctagcgaatttgaagccatggaagaagctggttcggtagatttggaagcagaaaacgatactgtagaagaataaaagctgctagaggagggaaagatgaaaacgagaaaaatccctttgcgcaagtctgttgtgtccaatgaagtgattgataagcgtgatttgctccgcattgtcaagaacaaagaaggacaagtctttatcgatccgacaggcaaggccaatggccgtggcgcttacatcaagctagacaataaagaagccctagaggcgaaaaagaagaaggtctttaaccgtagctttgacatggaagtagaagaaagcttttatgacgagttgattgcttatgtggatcataaagtaaaaagaagagagttaggacttgaataagcaaaaaataagcaatctcttgggacttgctcagcgagcagggcgaattatatcgggtgaggaattggtcgttaaagccattcaagacggcaaggccaagttggtctttctagcccatgatgcaggccccaatctgaccaagaagattcaagataaaagtcactattatcaagtagaaattgtaaccgtgttttcaacactggaattaagcatagcagtcggaaaatcaagaaaggttttggctgtgacagatgctggatttacaaagaaaatgaggtctcttatggaatagaagaggaggacatgatttgtctaagaaaagattgtacgaaatcgcaaaagaacttggaaaagaaagtaaagaagttgtagcgcgtgcaaaagagttgggcttggatgtgaaaagccactcatcaagtgtggaagaagctgtcgctgcaaaaatcgctgccagctttaagcctgcagctgctccgaaagaagaagcaaaacctgcagcaccaaaagcaagtgcagaaaagaaagccgaaaaatctgagccagctaaaccagctgtagctaaggaagaggcaaaaccggctgagccagttgctccgaaggcagaaaaagtagcaacaaaaccgcaaagccgtaatttcaaggctgagcgtgaagcccgtgccaaagagcaggcagaacgacgcaagcaaaacaagagcaataaccgtgaccaacaacaaaacgggaaccgtcagaaaaacgacggccgcaatggtggaaaacaaggtcaaggcaaccgcgacaatcgccgttttaacgaccaagctaagaaacagcaaggtcagcaaaatcgtggaaatgagcgtcgtcaacaagaggacaaacgtccacatcaagcggctccacgtgttgactttaaagcccgtgcagcagccctaaaagcagagcaaaatgcagaatatgcccgttcaagtgaggaacgtttcaagcagactcaggctgccaaagaagccttggctcaagctaacaaacgcaaggagccagaggaaatctttgaagaagtggctaagttagctgaacaagcgcaacaagttcaagcagtggttgaaccagctcctgtagctaaagaagcgccagtggatacacgtcgtaaaaaacaagctcgaccagacaaagaacgtgatgattatgatcacgaagacgatggtcctagaaaacaacaaaagaatcgaagtagtcaaaatcaagtgagaaatcaaaagaatagtaactggaataacaacaaaaagaacaaaaaaggcaataacaagaacaatcgtaatcagactccaaaacctgttacagagcgtaaattccatgaattgccaacagaatttgaatatacagatggtatgaccgttgcggaaatcgcaaaacgtatcaaacgtgaaccagctgaaatcgttaagaaacttttcatgatgggtgtcatggccacacaaaaccaatccttggatggggaaacaatcgaactcctcatggtggattatggtatcgaagccaaacaaaaagttgaagtggataatgccgacatcgaacgtttctttgtcgaagatggttatctcaatgaagatgaattggttgagcgcccaccagttgtaaccatcatgggacacgttgaccatggtaaaacaacactcttagatacccttcgtaactctcgtgttgcgacaggtgaagcaggtggtatcactcagcatatcggtgcctaccaaatcgtggaaaatggtaagaagattaccttccttgatacaccaggacacgcggcctttacatctatgcgcgcgcgtggtgcttctgttaccgatattactatcttggtcgtagcggcagatgacggggttatgcctcagactatcgaagccattaaccactcaaaagcggccaacgttccaatcatcgtagctatcaacaagattgataaaccaggtgctaacccagaacgtgttatcggtgaattggcagagcatggtgttatgtcaacagcttggggtggagattctgaatttgttgaaatctcagctaaattcaaccaaaatatcgaagaattgttggaaacagtccttcttgtggctgaaatccaagaactcaaggcagacccaacagtgcgtgcgatcggtacagttatcgaagcgcgcttggataaaggaaaaggtgcggtcgcaacccttcttgttcaacaaggtaccttgaatgtccaagacccaatcgttgtcggaaataccttcggtcgtgtccgtgccatgaccaatgaccttggtcgtcgtgttaaggttgctggaccatcaacaccagtttcaatcacaggtttgaacgaagcgccaatggcaggtgaccactttgccgtttacgaggatgaaaaatctgcgcgtgcagcaggtgaagagcgtgccaaacgtgcccttatgaaacaacgtcaagctacccaacgtgttagccttgaaaacctctttgatacccttaaagctggtgaactcaagtcagttaacgtcatcatcaaggccgatgtacaaggttctgttgaagccctttctgcatcacttcaaaagatagacgtggaaggtgttaaagttactatcgttcactcagcggtcggtgctatcaacgaatcagacgtaacccttgccgaagcttcaaatgcctttatcgttggtttcaacgtacgccctacaccacaagctcgtcaacaagcagaagctgacgatgttgagatccgtctccacagtattatctacaaggttatcgaagagatggaagaagctatgaaagggatgcttgatccagaatttgaagaaaaagttattggtgaagcagttattcgtgaaaccttcaaggtgtctaaagtgggaactatcggtggattcatggttatcaatggtaaggttacccgtgactctaaagtccgtgttatccgtgacggtgtcgttatctatgacggtgaactcgcaagcttgaaacactacaaagacgacgttaaggaagttacaaacggtcgtgaaggtggattgatgatcgatggctacaatgatatcaagactgatgatgtgattgaggcctacgtcatggaagaaatcaagagataagattttttgctcctttcttaggtggtgagggacgcaagcaaaccgatggtttcattgcttatttttgagcctagagtctcaaaaatcccctgtgatgggactgataaatcagttccatcactttcaccacggcgaaagaagcagatgatttcaaattgaacttcgttccaatttgaaatgaaaatcaataaatttaaaaatagctaggtctgctggcctagcttttggttcaaagtagagaaaggaatatcatggcaaatcattttcgtacggatcgtgtgggcatggaaatcaagcgtgaagtcaatgagattttgcaaaagaaagtccgtgatccgcgtgtccaaggtgtgaccatcacagatgttcagatgctaggtgacttgtctgttgccaaggtttactataccattttgagtaaccttgcttcagataatcaaaaagcccaaatcgggcttgaaaaagcaactggtactatcaaacgtgaacttggtcgcaatttgaaattgtacaaaatcccagatttgactttcgtcaaagacgaatccatcgaatatggaaacaagattgacgagatgctacgcaatctggataagaactaaaaaggaggggaaaccctcttttttgtgggggaaaaggcaataaaacatgctggcggaatatttccagagttatattaaaaagctttataaaattcaacttgtatgatattataggaaataaaaagagtgagagagaacgatttttcagaaataggcaacaaggctggtatcgatatcattttgaaagtgtagttaaacgaggaaagataatatgggactcataaaaattctagctaaaacttacgggaattactttttgaccatgcaaggtgtaaaagtcatgaaaacgataaagaaagatgaccatgtcgttgttggtctggggaaactttttattgcagacaagttaatggatacggctcggtggctcatcaagccagaggagagagaatgaaatttttctgggcgattcttgctattctttttatcaaaccaattattggaattatgaaattcctgtggatgatcatctcttttgcagtccaattgctactctataagatattatttaagatattggattggctctttaaacttatttagatggtcatccaagtcgtggggaactagcaggtcttgtactgctagttttttaatctctctccatatggtataatataagcagtaaaatcattttatactcttcgaaaatctcttcaaaccacgtcagcgttgccttgccgtaggtatggttactgacttcgtcagttctatccacaacctcaaaacactgttttgagcagcctgcggccagcttcctagtttgctctttgattttcattgagtattagaacatacaatggaggtcgtcatggacaatatcatcgatgtgtcaattcctgttgcagaagtggtggacaagcatccagaagtcttggaaatcctagtggaactcggttttaaaccacttgctaaccccttgatgcgcaacacagtcggtcgcaaagtatcgcttaagcagggttctaagctggaagggactcctatggacaagattgtccgcacactggaagcaaatggctacgaagtgattggattagactaatggcagatgagcgaattcatatcctacgggatattttgttagaattgcacaatggcgcctctcctgagtcggttcaggagcgctttgatgcgacctttacaggtgtttcagccatcgagatttcccttatggagcacgagctgatgaactcagactcaggtgtcacctttgaagatgttatggaactttgtgatgtccatgccaatctttttaaaaatgctgttaagggtgtcgaagttgcagatactgagcatcctggccaccccgttcgtgtcttcaaggaagaaaatctggctctccgtgctgccttaattcgcattcggagattgctagatacctatgagtctatggaagacgaggaaatgctggcggagatgcgtaagggtttggtccgtcagatgggacttgtgggtcaatttgatatccattaccaacgtaaggaagaacttttctttcctatcatggagcgctatggacacgattcacctccaaaagttatgtggggagtggatgatcagatcagggaactctttcaaacagctttagcgacagccaagtcactacctgaagtgtcgatttccactgtaaaagatacttttgaagcctttgcgacagagtttgaaagtatgattttcaaggaagaatccatcctcctcatgattctccttgagtcctttactcaggatgactggcttcagattgcggaggagagcgacacctatggttatgccatcatccgtccgtctgagaaatgggtgccagaaagacagagttttgttgaggaaaagattgcagaggagcctattcagctagatacggcag

SEQ ID NO: 69 - DNA, 16944 bp, Streptococcus mitis NCTC 12261 contig15
acactcaaaaccatgtttagcagctgcgactagctcctagttgctcttgatttcatgagtatcaaaagcccgatgtttccatcaggcttcttttttatccatgtacacgtttcatatagtcttggtaactttcggtatccatgagttttttagcgttcttgacgcggtctgctgttggtggtttgaccccttcgagggaatatggaattcccaattcacgccatttaaactcacccatagtgtgataaggcagaatttcaaacttatcaacatttttgagggtcttgacgaacttcccaagttcaatcaagtcgtcatctctatctgtcaatcctggaactagcacatggcgaatccagacaggttttccaatatctgatagatactgggcacaagccaagatatttttattggtttggctagtgacaatcttgtgctgttcttcgttgatttccttgatatccaagagaaccaagtcagtgacagccatgagtttgtcaaacttctcaaggtaacgtggtttattacggaaaggaagggcacaggtatccaaggtacagtggattccttgttccttagccttagtgaagagggcaatcaggaaatcaatctgcaagagggcttctcctccactgactgtaatcccacccttatttccccagaaaccgcggtagcgcaaggcctctgtcaaaacatcatctaccgtccgttcacgcgatttattagactccatagcccaagtgtccgggttgtggcaatactggcaacgcatgtgacagccctgcaaaaagacaataaagcgaataccaggtccatctactgatccaaagctttctgtcgaatgtaccattcctgtcacttgtccataatcaattgtttcttcagacatatcgttaccttccttgaaaacgttttatagttttattatatcacgacttgaaggaaaaacaagatttttgcctattttttagaaagcaatctgtttttcaatttcattttcaattacttatcattttattcttcaaaatcaaagccatacaaggttgcaaagtagtcctcaggtcgctctgcacggcgaatttgacgggctttaccttcttcggtatagaggatttccgcagaacgaagtttggcgttgtactggtaacccattgaaaaaccgtgggcacctgtatcatgaattatcagcaaatcaccgatttctgtatgaggcaattcgcgattcactgcaaatttatcattgttttcacagagtgaaccgaccacatctaccacttcagctggtccttctagatgtgtcagattggtaatatggtggtaggctccgtacatggctggacgcatgaggttgactgccgatgcatccacacctagataggtacggtaggttttcttcttatgggtaactcttgtgaccaaagcaccgtgaggtgctaacataaagcgacccaattcggtgaaaatcttgacttgaccaagacctgctggcgtaaggacctcttcatacaccttacgaactccctcaccaatcaaggcaatatcatttggctcctggtctggacgatagttgacaccaataccgccagaaagattgataaagtctagcgaaatgcccaacttttccttgatttcaacagccaattcaaaaagctgacgagccaactctggataatagagatgggtcacggtattggacgctaggaaggagtgaatcccaaaagtcttagctcctttttccttcaagatggcaaaagcttcaaagagctggtccttggtcatgccaaacttggcttctccaggattgtccataatatctgttcctagctcaaaaacaccaccaggattgtaacgacaagagatgatttctggaatgcctgctgcgcgctctagatgttcaatatcttcaaaggcatccaagttaatggtcgcacccaattcacgcgcataggcatattccttatctggcgtattgtttgaagagaacataatctcagaaccagggaaattcagtttatgactcatcaaaagttctacataactagagcagtccactccacaaccttcctcttgaagaattttcaagatagctggtgttggagtagccttaaccgcaaaatattccttaaagcccttgttccaggaaaatgcttggttgacggcccttgccttctcacgaatccccttctcatcatataagtgaaagggagtcgggaactcggcaacaatcgcttctaagtcttctctattgataaatggtgttttcatatacttccttctattctatttgcaaagaaaggctgggacaagcgttccaacctttagttctatctcttatttatcttcgtcaaagatattaccaacctcaacatcgatggcttggttcttgacatcaatattggttaccttcaagagtgacttgtagtcaaactgcttttcgcgttcttcttgagcattatccgcaaagaccgctacaccagccaattctgaatcaaactcacgcaagagactaatcatcccgttgacagttcctccgcctttcaagaagtcatccacaatcaagacacggctgcctgccttgagactgcgttttgaaaggaacattttctcaatgcggtcaccacttgaacctgatacatagttgacgctaacagttgaaccttcggtaattttcaggtcgcggcgcacaataacaaagggaacattgaggacattggcaactgcatttgcaagaggaacacccttagtcgctacggtcataacggcatcaattttttggtccataaagctcttggcaataatacgaccaatatttttcaagatagctggtgtgctgagcaaatcggacaggtagatgtaaccacctggcaagatacggtcactttctgacaacttggcacgcaagtcttcaaccatttccttggcatcatggcttgagattgatggtgtgaaaatgacaccaccaccagcaccagttactgtctggatatgaccgatttcaatttcctcaaaggcacgtttgataatgacgatatcctctgagatggatgatttagcagattcatacttttcagcaaaagtattgagactagttagtttataaggattattgatcaaatagttggaaatgacaaccatccgatcacttcttcttaatttcatttctatttcccacttcatttaattttgatattttatctattataccatattcacataaaaaaacgaacattcttatcctaaaaatgctcgtttttcttaaattattaatctaaatctggtttatagaaggaacgattgtccatagcgaagattttattggtcatctctcctttatccaccaaagccagagctgttgacatcatcatcatgcttgcatccagattatcaatcatatggataatctctgcttccataatgcgtggacggactggacttccatactcaagcaagccgtggtgactaaggatgacgtgacgaagcagaacgacttcttccttggtatcatcgataccgagttccataactgtcttggtaatttcgctatcaatcaaagcaatatgcccaagaagattgcctcgcactgtgtactcggtctggtctggtcccgtcaactcgatgaccttagccaagtcatgcagcataatccccgcatagagcaggctcttattgagctgaggataaacttcgctaatagcatctgccaaacgcaccatggtcgccgtatgataggccaaacccgtttcaaaggcatggtgattagtcttggcagctggataggagtagaattccttatcatacttggtgtagagctttcggacaattcgttgccagacaggattttcaattttaaaaatcatttgcgacatgtagtcacggatttccttgacatcaactggtgacttgaccttgaaatcagctgggtcattgggttcaccaggttgaggcaggcgaagggtaatttgattgacttgaggggtgttgttataaacttctcggcgtcctttcatgtggacaaccttacctgcagtataggcctcaacgttatgaggttgggcatcccagagtttcccttcaatctcgccactatcatcttggaaggtaaaggctaggtagtttttcccagctcgagtttgcctcagatcagctgacttgattaggtaaaaaccttcaaacagctcatcttttttcatgtgactaatcttcatattcttcctcattttcttggaaatggagtagatcaagcgcaggctcatcttctgacaactcaatgtgacggagcgtccgctcgatagctatggtacgacggtttaatagttcatcaatattgccagaggcatgttggaggtgtttttgtgccttgaccagaatgccaccaaacttgccaaactcggtcttaacgctagcaagggtcttgctgatatggtcggcactcttttggatattgagagtcttgaagccaactgatagggaattgaggagggctgacagggtacttggacctgcgacaataatctgttcctcccgtctcaaatcatcaaagaaaaccggattgcggacaatttctgagtagagaccttctgttggaacaaacaagactccaaaattggttgtccgaggcggtgctagatacttattcctgatatccttagcaaagcgcttgacgcttgctaaaagcgatttacgacagcgttcaatctcgtccttatcacctgcttcataggcttcttctagacggtaataatctgccagtggaaacttagagtcaattggtaggtagacgtattcctggtcgccttgtccgggcaacttgatggcatactccactcgttcactagagttttcaaccgttgcaaattctctttcgtactgggcaggtgtcatgatgtcttcgatgatttgccccagttgcaattctccaagaatccctcgcgttttggttccagagagaaccttgttaagggcgccgacatcacgggcaactgtctgcatttctcccaggccacgattgaccgactccagttgtttggaaactgtctcaaaggaagcctgcaagcgtgtctgtaaggtcttttctagtttttcctcgactgtttggcgcatttgttccaagcgttgctcatttgattcctgcaaggcttggagacgttggtcagtcttgtctctggtttggaggagattatctgtcatttcttgacgaacctgagtcagaccttggtgcaattcaattctcacttcttgcaaacggtcactgacagacacttccaaatctttttgatctaactggctggcttgtcttgcttgttcaaagcggtaatccaactggtctgacaagtgatctgcctgatcctccaagatcttacttagatgtttttcctgcttatcctgcctttgccaaatcagaaagataccagctaggttggcaatcaataatagaacaagtaaactttccatcctacctcctgtccttgctatgcagtacgaccacataaccatctgggcaagtcaccgaaacttccctatctatatattcgttagaagcgtacacttttttaaagaaaaaattctcctctgtcaactcatacttagctccgagaatagtcagctggctatcccgaactggcataaaggctagatagtcgtagtctgaacggggttctagctgactggtcccttctggacaataggcaatcaaattttgcccatcctcaatttctatctggcgcatatagggcgccaacttaggattgctaggtagaaagacgttagctagcatatgatcaatacgaccacccaaagcaccgaaaatagtaacctgagcctgagaattttgctcaaagatggttaagagagccaattccagatctgtatcatctttttctggtcgggcttgaacaaaatgctgggcacgtttttgaatcacctgtcgctcttctgcagtaacagaatcaaaatccccaactgctagagcaagaggcagcttttcttccaagacccagagcgagcctcgatccacaccgacaaagcaatcaaagtctgtccgataatgaccgcggtctccgcctgcaaaaacggcaaccctagtccagttgttttctgagagtttgtactcgctcattgacatctcccttaaagacataggaacctgctacaaaaacggtcgcaccagcttctttagcttgggcaatagtttggtcatcaatcccaccatccacttcaatctcaaagttcaaacctttttcctcacgaagggcaaccaactcacggaccttatccatggtctctggtagaaaggcttgcccaccaaagcctgggttaactgtcatgactaagacttggtcaactaggtgaagcacgtgcttgatggcttcaactggtgtgccaggattgataacaactgaaggcttaactccgagtgaacgaattttttggagggcaccatgaatatggggcgttgcttccacatggatactgatgatatccgcacctgcacgcgcaaagtcttctaaatgatgctctggattagctaccatcaagtggcagtcgaagaccatcttactatgaggacgaagagcttcaaccacacctgcaccaaaactgatttgcgggacaaaatggccatccatgatatcgatatgggcatactctgccccagttgcttctagacgtttgatttcacgttcaaagttggcataatctgctgccagaattgacggagcaatcttgtattgagacataggtttctccttattttggaatttttttgctgacttttttataggtttctctgcgattttcaatctcactgaggaattgcaggtagttgtcaaaacggaagggcgcaatggtaccttcttcaactgctggcttaaccgcacaagaaggctcatgggtatgggtacaagtacggaatttgcagtctcgactgacagtggcaatctctgggaaggcctgattgaggtcttccgccgttgatacttcataatccaaggatgaaaaacctggtgtgtctgcgattttacccccattgagattataaaaactaactgctcgagtagtgtggcgcccgcgacccagactgtctgaaatttctcctgtttcaagattgaggtctggtgcgattttattgagaagagttgacttcccaacacctgtctgccccataaagaccgtaaccttgcctgttaataaaggcaggagtgcctctttactggtcacaaagtcgtagccgatattaccataagtctgttcataaaaatccagttcttctctatcttccaacaaatccattttagaaatataaacgatgggatggattcccttgtgttccaaaagaaccaagaaacgatccagcaaattgctgttaaaatcaggttccttgacggacatgattactacagcttggtcaatattgacaatgggcggacggactaggctatttttgcgttcgtgaatcttgaggatatagccttctgaattttcttcggcagaaaagtcgacccagtccccaacgtaaggggtatgaccttttttacggaaatttccacgcgctcgtgtttgatacaccttgccctcactttctacatagtagaaccccgccaaggctttaatgatttgtccctgcatcttagagtccttgccctttaagtgcgtctgctaggctagcaaactctgccaagctgagagcttccccacgtacacttggtgacaagcctgcttgatccaaagccttggtcagcttgtccttaacctcttcagtcttgccaaagtaacctgtcaagttattccacaaggtcttgcggcgatgggtaaaactagccttggaaaccttaaagaagaagttctcgtcttccactgctacggctggctctggacgacgcaccattttcaagatggccgaatccacatttggcgctggcacaaagaccgtacgaggcacgataaaggcaaccttagctgtcatatagtattgaacagcgattgacaagctgccatatgccttagtgttaggctgggctgaaatgcggtccgccacttctttttgcatcatgacgacaaactcactaaacggaatgccactttcaatcaagtgcatgagaataggtgtcgtgatgtagtatggtaagttagctactaccttgattggcaggtcaggatttttaaaattctggatatgttgcgccaaattaaccttgagaatatcctcgttgactacggtcacattgtcaaaatcacgcaaggtatctgccaaaataggcaccaaacggtggtcgatctcaaaggccataacttctgctgcacgctcagccaaaaactccgtcaaggcaccaatccctggcccgatttcgatgacattaacctggtcatcaatctcagccgtatccacgattttttgaagaatattggtatccgtcaagaaattttgcccgaaggactttttaaaggtaaaaccgtgacgctccagcactgccttggtcacgctgtaatctgcaattctcatctattctcttttctattatctgttacttctattgtaacacattccccttacatttggggtctgcttagctgttctcataagatttcatagcttcttccacttctgccaaggtaaccccaaacaactctaggcgtttgaggagttgcttgccgttggaatagccaattcggagagcctctcctagatattctcgtcgcttacggctgtctgcccctgctagaaaaccaaggcgaatcaagtcgctacgactgatatcaaactgactctcatgttcaaattgttctgtaatctgagctagagccattttcaggtcttcatagctggcatgctcaattcccagagaacggcccttggtcttggacttgggaacagcttcatctcgtttgaggaaggcatgctgaactgttggaatagccgtcataatcatgcgacgaatccgctccccattaaaatctgggtctgtaaagacaatgactccatgaagctcatgtaggcgctgaatacgtgcaatatcttgctcattgatggcagaacctcgtgtctcataggtctctacatcgaaatagcgtttgagattggccgtatcatcgcgcccttcgaccacgataacttgggaaattttttctttcattacttgctgtccaatccaaaaattcgttctgcatttgcagttgttatcgccgctagctcttctgtcgtcataccacgtaagtcggcgataaagtccactacatagcgagtgtaggctgttttattttcacgaccacgtttaggaacaggagccaagtaaggcgcatccgtctccaccaaaatcttgtccaaaggaagttctctagccgcctcttggatgtcggtggccttcttaaaagtcaccactcctgagaaggaaatagtcatgccaagcgcgacaaacttctctgcccactcaagagtccctgaaaatgagtgcataatcccaccacgaggaccaacgccctcacttttgataatctcataggtatcttccagcgcatcacgagtatggacaacaaaaggtaaatccaagtccttagataactgaatctgacggcgaaaaacctgctcctgcacctcttttggcgctgtcatccaatggtagtccaaaccaatctcacctaaagcaacaaccttgggatgcttgagcttatcaagcaagtaggcttcaatctcctccgtgtaagtccctgcttctgtcggatgccaaccaatagtcgcatagagctggtcatactcatctaccaactccaaggcacgctcgaatcggtcggtttatcaaaaccaacaatattcatctgtgtcacacccatctcagcagctaaggcgatttcttctgcctcatgacctgcaaattcttctacattcaagtgtgtatgtgtatcaaaaatcatctcttctaacctcgttttctatcttctattataccaaaaaactgccctctctcctcatctgtacaaaatattctaaaatccatcgtcgtctcttgacgctattttcccaaagcagtataatagcacttattgaaattttcagaaaaggaaaatacaatgtttacaaaattaaaacagacctttatcggtcgtcctcttaagtccttaacagaaggcgagggaggtctgctgggaaaaatgcaggccttggccatgttgtcaagcgacgctctatcttccattgcctatgggcctgagcaagtagtcctcgtcttggctagtctctctcctcttgcgatatggtggagtcttcctatcggcctctttgtcctcctactcctagctagcctgaccgtctcctaccgtcaaatcatccatgcctaccctcaaggaggaggggcctatatggttactcgagaaaatctatctcccgaacttggcttaattgctggaggtagtctgctggttgactacatgctgactgtggcggtatcggtgtcatctggagccgatgctatcacagcagctctccctgctctccacccttacaacctccacatttccatttttctagtttgtttgcttatgctcttgaatttacggggcttaaaagaatctgccagttcactgatgattcctgtctatctctttatcatcagtactgtctttctcttgctctatggaatctttcaactagtaactggttctctcagctatcaggcaacttctcctatcgggcatgctgtaccgagtctgtctatcgttctcattctaagagcctttaccagtggttctgcctctctgacaggggttgaagctatttcaaatgccgttccctttttcaaggctccgaaagaaaagaatgcagctcagaccttgaccatcatgtcactgattttaggttttctgtttgctggtattaccttcctaaactactggatgggaattatgccgcaacacggagaaaccatcctctcacagatggctcaaggtatccttggtaattccttcttaggccaccttggctattataccttccaattctccacagccttaattttggccgtagctgcaaataccggcttttcggccttccctatgctagcttacaatatggctaaaaacaaatacatgccccatctctttatggaaaaaggagaccgcctaggctactctaatggaattttaactctggcatttggggctatgattcttcttctcatttttaatggcaataccgaacgtttgattcccctttatactatcggggtcttcgttcccttcgccctatctcagactgggatgattcgccattggaaaaaagaaaaagggacaaatttcttaaaacctgcccttgccaatatccttggagccatcatttgctacgctatcgtgctgatcctgctctttttccgtctcagtgatatctggcctttcttcccgattattctcgtactcaccctacttttcttggccattcacagtcattaccaaaaagtggcccaacaactacgtctctatgaaggcatcgaaaaacgtacctacgatggcaatcttgtcctcgtcctagtaggaaatgtcacccgagttagcgtcggagccattaactacgctcaaagtatcggtgatgaagtcttagccatgcacatttctactaaggaaacagcagagaaagaccaagaaattctccaagaatttgccgattacttcccaaccattactctgaagaacatcaagaccagctaccgcgacatcatcacccctactgtcaagtatgtcaaacgaatctctgaggatgcccagaaaaagaactatacagtcactgtcctggtaccccagtttatccctaataaaccttggcaaaatatcctgcacaatcagatgagtcttaaactcaaatacgcccttcgttggcaccaagacgtcgttgtcgctagctactcttatcacttaaaagaataaagaaaaggccctaccagaagcaagaagcgtctggtaaggcctttttctgaattcagccactatgcttatactcaatgaaaatcaaagagcaaactaggaagctagccgcaggctgctcaaagcactactttgaggtcgtagatgaaactgacgaagtcagctcaaaacactgttttgaggttgcagatagaactgacgaagtcagtaaccatatatacggtaaggcaacgctgacgtggtttgaagagattttcgaagagtattaactgaaaagcatgactaggaatattattgaatatggttagctaaatcttcctgagcttttttatttgactcagctttttctttcagccatttttcatagagttcttgatactgtttagcagtgactggctctttttgcaattcaacatatttgtagttgtcagcatttcccttatgaccaacgaatgagaatgggcctgtaaacggtacagtcttacggaagattgggttagctccaccactttgaactggtaggaagagggcactatctgtcaaccaagcttgggcttcagcatatttttcatagcgagcttgagtatctgtgatttccgcatcagcctgatccaagagtttcttgtagtcagaaagaccaatcttgttcttgacttccttgtcttttccttcagacaagcccatgtttttcaactgagaacctgtctctggatcaagaatagctaggtaagtcttaggatctgagtagtctccaccccatcctgagatgtcgatatcgtagtctttttgttctgctgtatctgcaaagtaggttgcctggtctttttcatctggagaaagttggataacatcgataactacattctccttaccaagagtttcttctactgtttgtttgaaagagccagcctgttgcacatctaatttggcagtctggtcaactggcatatccaaatgaattgggaaggttactccttgagcttgcagactttctttggccttggcaaacttctctttggccttttcaggattcaagaaggcttgcttaccatcgtttaggttgatatttgcccaatctttaccgtagttgacaattttctcattgacaatgtcaccgaagttcttatcaccaacttgaacaaagttacttggtgtaatcgtattacgcaagatacggtctgctccatcttcaccatttgtctgcgctgcataggcatgacggtcaaaggcaaagttgatagcctgacggaaatctttattttgcatagctgcgcgtgaatccgtcttttccttatcagactgtttcatagtctgcttgtagctttgacgattcacgttgaaaagataatagaaagtaactgagttttgcggtgtgtaggtaatcttgtcctcattccccttcttgagttcagcaaagactgaacttgttgggaagatacggccatctgtatagttaccatccaagaaacctctagcaatgctgtcttggtcagaaccgtcaaagaaagagagtttcactttctcgattttaacattgtccttatcccagtaattagggtttttgtcaagttcaatcaaagatttggatgtgaatgatttaaataagtaaggaccatttgacaagatacttgatggtgtcacacttccaaagtcatctccctgagacttcaagaaggcttcatttacaggactaaggatacttgctgttgttttagagttccaataagtctcaggttggttgagagtgtattgtagcgtgtaatcatccactgccttaacaccaacagttgcaaaatcagatgatttcccttcaacatagtctgctagtcccttgatagagtcttgaaccaagtacaagttctcagcttttttatcagccgcatacttgagaccagtcacaaaatcatgagccgtcacatccgcatactcttctccttcagaagtgtaccatttagctccctgacggattttataagtgtaagtcaaaccatcttttgacacggtccatgactcagccatagaggggatgagattgccatactggtcattttccaacaaaccatcaaccaagttggttgtgatactagatgtagagtctcgtgtagaggtaatgtaatccaaggtatcagggttgctgacaaagatataagagtatgtcttgtcagcattgcttgattgagatgacccgcatgccgctagagctagacctgctgtcaaagccatagctccaaaaagcataacttttgatttcttcatgattattctccattttttacagtatgtgaaatattatacactatttgagcaaaaatataaagcctttttgaacttttttacaaaaataaaaatcagtagactcgagttcctactgatttttgttatggttcgtttggattatgcagccaaaactttgcgtcctttacgacgacgagctgccaatacgcgacgaccgtttttagttgacatacggttacggaatccgtgtttgcgcgcacgacgaagtttacttggttgataagtacgtttcacgatgaatacctcctcatagattttgtattcgtttagccggctataaagtgatcagttactaaacatactttactattctatctgattctttcacttttgtcaatagctctaggcaaatgtttccagctttttcgaatgtaagccctatctacgatactgtttcaagaaacgagtcatcttttcttggatttgggctagttcatcaacacgaggaaggtaaacgatacggaagtggtctggttcctgccagttaaagcctcgaccatgaaccaagagaaccttttcctgcttcaagaaatcaaggacaaactgttcatcatcatcgatacggtacatattgcggtcgattttagggaagatatagagtccagccttgggtttaacggcagacaaacctggaatatcttgaatggcattgtagatgaagtttctttgctcgtaaattcgtccacctggaaggagcaattcatcaactgattggtgaccacccaaggaagtttgtacgacttgttgggccaaaacgttagagcaaagacgcatattggacagcatattgagcccttcgatatagcctttaacatgtgtcttaggtccagacaagaccatccaacctacacggaagccagcaatacggtgggattttgataaaccattcatgctgacacagaagacatctggtgccaagctcgccacaggcgtatgcacgtgtccatccatgaccatgcggtcgtaaatttcatccgcaaagataatcaaatcgttttgacgggcaatctcaataatttccagcaagagttctttaggataaagggctccagttgggttgtttggattgataaggacgattgccttggtattggaagtgatttttgacttgatatcgtcaatatctgggtaccattctgcaacttcatcacagatatagtgaacggcatttcctccagctaggctgacagccgctgtccaaagaggatagtctggcattggcaccaagacctcgtctccattgtccaaaagcccctgcatggacatgacaatcaactcactaacaccatttccaagataaatatcatcaatatctacatttgggaatttcttcagttgacaatactgcataatagccttacgggctgagaaaatccccttggagtcagaatatccttcactatcacgtgcattcataatcaaatcatgaatgacctcgtctggcgctgtaaagccaaattctgctggatttcctgtattcagacgtaaaatcttttctccgtttgctcgcatccgcatggcttcttccaaaacaggaccacggatatcataagcaacatgctctaacttactagacttgttatattctttcatcttgtttcctcaattcatcgagatagtaacattataccactagaaagggattgcgacaagtttactgaaatgtgttattaaaatcctacagaagaaaaacctcactaagagcgaggtcaagacaggggagatagcaggtgttttgacaaaaaaacatcacataccaaaagataagcctagaaaaagcaagcctaaaaaggagtcataaagaagattgaacatgaggaaaagtccccatatcatcaagtaatcccaacgcccacttcgtttagcgactaggaataataccaaatggtagagtaaatgaaagactaaaaagccaacaaaacctggatagagaagcggaattagcttctctaattgccagatcatgataacttctagcaagactgaaactaggatgattccataataaaggaaatttgaattttttgtttcttgaaaagcgtttttcatcattctccctcccttcacttctttcctgctatcctttcttttattttatcatatatttatatagattttaatcgctaacattcttttgaaaaatactttttttgctttacttctatagtgaaaaggtttacaattatagtaagaaaatttcaggaggtttcattatggcacaacgttaccaaaatatcatggtcgcaatcgatggttctaaagaagcggacttggcttttgtcaagggagttcattctgctctacgaaacgacgctaaactcaccatcgcccatgtcattgacacacgcgcactccaaagcgtatccacctttgatgctgaagtttacgaagaactccaagtcgacgctgaaagtttgatgaaagagtacgaaaaacgtgctaaagatgctggtgtggcagatgttcatatcgtcattgaaatgggaaatccaaagaccctactagcgcgtaccattcccgatgctgaagaagtggacctcatccttgttggcgcaactggcctcaacgcctttgaacgcctcttggtcggttcttcatctgaatacattctccgccatgctaaggtcgatttgctggttgtgagagaacaagagaaaactttgtaataacgaagaaaaggagctagaagctcctttttgtttactgtttatacttcaaaccacgtcaacgtcgccttgccatatatat

SEQ ID NO: 70 - DNA, 112411 bp, Streptococcus mitis NCTC 12261 contig16
gggctcccggttttggagtaacttcagacaagataccgagtgatttgctggatttggtggatggtcttcattttcacacctaccatttcccatagcaaccgacatcccaacgcctgccagcatttcaagatcgttatcggagtcaccaaaggccatgacttggttgaggtcaaagccatattcttttccaactcggcgaataccttccaatttagagtttccttgattgatgacatccgctgcaaaaggattgctacgtgtcaatttcaaatcttcaaaatcagctgccgccttctcagattcttctggcgtcatcagcatcaaaacttggtagataggctgattgatcagatgaagcagatcttcttccttttggggaacaaccttgctgaccatacgattaaaggaatgactcaccgtccgagttaaaacagagggaacgaagcgactgattcgttgggaaaaagaacccaaaccaaaggacatgattttagaacctaacatggcatccttggtccctagagcaatctccttaccctcttttttagcataagtaatgagctggcgcaaatgtaacttggaaatagggctcgtaaacaagactctgtctttattaaagatatactggccattgtaagttaccgcaaagtccagatccaaatcgtccatcaattccttaacaaaaaaaggtcctcgacctgtcgctacgccgacaagtaccccttgctctttgacgattttaatcgcgtccttagtggatttcaaaacactcttgtgatcgttgaccaaggttccatcgatatcaaaaaaaacagctttgacttccatcctatcccaatctccccttttgtgatacaatgattataccacatttcagaaagagtgagtaaatcatgcctaagaaaatccttgttttacatacgggtggaactatttccatgcaggccgatgcttctggcgctgttgtgacgagttcagataatcccatgaaccatgtgtccaacccacttgaaggaatccaagtccacgccttagacttttttaacctgccaagcccccatatcaaacccaagcatatgctagccctctaccagaaaattaaagaggaagctgctaactacgatggagtggtaatcacacacgggaccgatactttagaggaaacagcctatttccttgataccatggaagttccccatatgcctatcgttctaacaggggccatgcgtagctctaacgaactcggcagcgacggtgtttataactatctgagtgctttacgggtggctagcgatgacagggctgctgacaaaggggttttggttgttatgaacgatgaaatccatgctgccaagtatgttaccaaaacgcatacgaccaacgtcggcaccttccagaccccaacacatgggccacttggtctgattacgaagcgggaaatcctctacttcaaaacagctgaacctcgtgttcgctttgaccttgatcacatacaaggcttagtccctatcatctcggcttatgcaggtatgacagatgagctgattgatatgctggatttggaacaattggacggcttgattatccaagccttcggagctggtaatattcccaaagaaacggctcaaaaattagaaaaccttctgcaaaaaggaatcccagtcgccctggtatcacgatgctttaacggtatagcggaacctgtttatgcctaccaaggtggaggcgtacagttgcaaaaatcaggcgttttctttgttaaagaactcaatgcccaaaaagcccgtttgaaactcctcattgccctcaatgccggactaagaggacaggctttgaaagactatatggaagggtaagtctcttctccagaaagcaaaatcaggaaatctgcacgattccctgattttttctatttccgttttcgtgttgagcgacgttctgtcaaaccatgaggtaagagaacttcacgttcttccaactcttccttgtgcataatcttggtcaacatacgcatactgatggccccaaggtcataaagaggttgggcaatagttgtcaagtttggacgggtaaagcgtgagatttgtgaatcatcactagtaatgatttcaaattcttctggtactgatacacccttatcagcaaggccgttcaagacacctgctgccagctcatcacctgttacaactgctgcagttgcgtttgatgaaatcaagcgttctgccaaggcataaccatcttcataagtgtatttagactcaaataccaatccttcgctataagaaatacctgcttttttcaaggcttccttgtagccaaccaaacgaaccttaccattgatatcatccactagtggaccgcttacgaaagcaatgcgctcattttctttagcaaggtaggtcactgcatcaatcgtagcttgtttgtagtcaatattaacacttggaagttggtgttctacatccacagttcctgcaagaacaactggtgttcgagaacgagaaaactctgaacgaattttttcagtcaagtggtaccccataaagatgataccatccacttgcttagaaaacagggtattgacaactgaaacttccttatcatcatcctcatcactattagcaagaacgatattatacttgtacatttcagcaatatcatcaatccctttggcaagcgttgagaaataaccattggtaatatttggtatcaccacaccgacagtggttgtctttttacttgcaagaccacgcgccactgcatttggacggtaatccaaacggtcaatcacctcaagcacttttttacgagtattctcttttacattcttattgccattgactacacggctaactgtcgccattgaaactcctgcttcacgggcgacatcataaatcgttactgtatcgtctgtattcattccatttcctttctatatcatacctcacgagactctaaaaaagagacggtatgaaaatttcgttttcatgattctacttattccattttatcactatttgtaaacactttcaagctttttttgaagattatttgaaaaaatttcataggaagctatgtttatgaagaaaaaatcaccttttcttgatttttaatcctatttgctgtatgataagggaaaagaaaggggggcagaaatatggcttttaccaatacccacatgcggtcggctagttttggcattgtaaccagcttacctgatgatgtcattgactctttttggtatatcatcgaccacttcttaaaaaatgtctttgaattggaagaagaactcgaatttcaattgcttaataaccaaggcaaaattaccttccacttctcaagtcaacacctccctacagccattgattttgactttaaccatcctttcgaccctctttatcccccgagagttctggttttagacatggatggtagagagactattctcctcccagaagaaaatgacctattttaatactcaatgaaaatcaaagagcaaactaggaagctagccgcaggctgctcaaaacactgttttgattttgcagatggaagctgacgtggtttgaagagattttcgaagagtataaaaactctagccttcagttgcaagtgactgaaaactagagttttttctattttttcaaagcattatacaagttacggataggttgctttaatgtcggatggataaaatgaggcgcaatttcttgtagagattcaaggacaaaaaggcgttccgctatgtaaggatgaggcaatatgaggtcggctgtataaaggatctggtcctccacaaagagcaagtccaaatcaatcaaacgaggtccccaatgcacttctctcacccgtcccatctctgactcaatggctaacaagctttctaacaagaccggtgctggtagccaggtttccacctcaaccacttgattagcaaagctatcctgctccactccaccccaaggctccgtcgttaagacactggactctttaagaatatggatgccacgagctcgcagtttgtcaatggcttgctccaagtttgcttgtttatctcccatattgcttcctagagcgataaaggctcgttgcttgcggcgatgaatggttaccgagcaagtatctagtggcaaatgaaccggcgcccaaggttttttcagttccagcttgatttcttggacaagaggataagtttcaaaggtacgttctaccagtttgtaggctaccgtttcaatcaagtcctcagttgtttcctgaaaccaagtcgtccactgctgacacagttctccataatggacagaggctgttaaatccaagtctgtagccgccttggtcatatcataggataggattgcggaaataacaaacttctgccctaattccttttcactaggaaaaagaccatgataggcaaaaatttccaaatccttaatctgcagttgatccataatgattcctttctagaaaaatccgcccaaagcggattctttttatagtcccattaaacgataagcctggtctcggaggtccttatctgtttcaaatagaccacgagctactgtcgtcaaggttgcagtgcctggttttctgacaccacgcatgctcatacacatatgttccgcctcaatgacaacaaaggctcctttagcacctagatagtccatcaaggcatcggccacttcgatattcaaacgttcttgaatttgtggttttttcgaataaacttcaaccgtacgggctagcttagacaaacctgctacacggccatctggaatataggcaatatgcgctctaccataaaatggcaagaagtggtgttcacacatagtatggaaaaagatatccttttctaccaccatattatcgtcgataatctcaaaggattttgacaaatgttcctccgctgtttgaccaagccctgaaaaaatctcttggtacatacgggccacacgagcaggcgtttcctgcaagccctcacggttagcgtcctctccgacagcctcgataatcatttttacagctgtttcaatcttttgtgtatccattttcgttcttcctctccatcagataagctctcacttggctcaagaaatacaatgaacctgtgacaatcctaactgtttgtttctcttcttttttatctgtcaatttctgctctagaaaatcctgccaaccttggtagctgagatttctagacttagctgcctctttcagcacgttttcatcagtcgcccgactatcgtcaaaatgtgtcagagtaagctcggtatctggcatggcccccagcaagtccaacatatcctccaaggccttggttttgatacaagtaaagaggatttccttacgataatctgcaaaacgttcttgcaaggttgctaataaagccttaatagcatggggattgtgggctccatccaaaatcatcaagggatctcttgacacgatttccaaacgccctggccaacttgtttcttccaaggcttgagcaagcaagtgattgcttgctagttctcgaccatcttcttgacaaaaagtatcaagtaaagctatggccatcccagcattctctatctggtgcaaaccaagcaggccagtctggaagtgaccttgtctgagagagctagtataatcaaagacttcccctgtcatcacactcttttgatgaccaacctgataatctgccccgtaggcaagtctcggcgcatctttcccttccgcagtgtggtcaatcacagccaaagcttctggagcaatgcgacctgtcaccaagggaataccttgtttgataataccagctttctgctctgctatggcttccaaggtgtcacctaaaagggctacatggtccaatccaatagtcgtgatgcctgttagaataggctggcagacattggtactatccaagagtccacccatgcccacttccatgatagccacatctacttgctctgaggcaaagtagtcataggctatggctgtgataatctcaaactcggttgtgccctgtaaattagcgaccgcttctccctccagcaaagactgatagtctgccatgagggtttctagcttcgcttctgggatagattccccattgatgctaatctggtctgtataatgaatgagatagggcgagctgaacaccccaactctcagccctagcttttctagcatatttttcaaaaaagcaatggtagaccccttgccattggtccctccgatatggatgaccttaagtttgagatggggattgccacgcaaagctaacagttccaccattcgttccaagccaaaatgcggttggtccgtccggtagttagtaatccactgattgttttcaatttctttcatcttatttgtattgttttaaatctagattttccgcttcatcagccagacgaatagcggaggcaatttcaaccgccatcctgtgactagctacgtcatgcactcgtaccacttccacaccctgtcgcgcagcgatactagttacatgagccgaagccgtatctcgattacggaaaccaggttctgtctcaggattgacttcaaaaccattttcttcaaggatattgatgacaaaccgcttgcgcgatactccgagaaagattggataccccttctgatttagtttatccaggtcacgtaaaagaagcagattttctttcttggtcagaccaaagccaattcctggatccaacaggatattctcttgtgcaatcccagcttcctctgctctcgctaaggctctgtaaaagaaagcctccatcaagtcttcgattggcaatttttcaaagccatctaactcctccactgtaaaagcctgaccaaagccaaaatgaggaaatatgagcgagctaggatgctgaggtcgagccataacgggattaaacatgatgatcaccttcgctccagccttagcaaccacataggccattttttcatcacccatgagaccagtaatatcattgactagattggcaccagcagccaaagcagcctctgctacctgacttttccaagtatcaatggagataaggacatcactttccttgcgaatagctttaatcactggaacaacacgctggatttcctcttctatctcaacatagctacttcccggccgagtcgattctccgccgatatctagcatgctggctccttccgctatcaatttacgagcctgctggagcgcctgctcaagagcaaaaaattgaccaccatccgaaaaggagtctggggttacattgataattccgcaaatagctgtctttgcatgattggttttacttgacatatcggtcactccctcaaggcttttcaccatattatttctctattttaccataaaaagaaaaagatggacacgattgcattcatctttttcccagtagaaacaagtaagcaattgtcaaaaatcttaaacagaaatccctaatgtccgactcaaaatcaccacgagagccaacaaacagaaaacaaccccattaacaatcatgtgaagtaagatagacatttccaaacgttgggtcttgtaagccgtccaagatagcactgttgacatacctccatagataagaagggaaggtaaattggtcggtaaatgaagcaaggcaaagataatagcaccgactatataacccacattttctttaccacgaaagagttttttgggaatcactcctcgacataaaatctcctcacagataggagctattagaacgagtaagaaaaaactggaaatcaaggaactattctggaccagatcattaatgtttgattgattgctggttgttgtttcattcctcaaatgtaacaataatacacccgaaatattactaataagaatgactaaataacttacggccaatctaaccaagtcctttaccttaaaaaacgataaactaaaactagccaactgtgattttctagcacctatgataaatacagttaaaaccacaagagataagattcctactaatagtccagtttgaagcagtggaaattttctgctagttagaaaagttgctagagccaaaggaaactgagaaaataaaagccctactagaaagattattagccacttccccctgtttaatacttcactccaaatattcttttttatcatcgatcatcctcctatcatttaatcaaaatcacctacttagtttaaagcaattttcaagtaactataatataaaagggggagaccccctttttatattatagcatttatagtgccatactaatgtagttaaggataaacaaggcatccaaaatccaaatcattacatgaacatctttagcttgacctttgacaagcttagtcaaggtataagtcaagaaaccaactgcaatcccttgagtgatagagtagctgaatcccataaagatagatgtgaagaaagcaggaaccgcttcagccatatcatcccaatggatatttttcaagctagccaacatcataatcccaacgataatcaagattggagctgtagcagctgttggtacgatcgctagaagtgggctaaagaagcttgaaattgcaaaacagattgccacaaccaaggctgtcaaacctgtacgtccacctgcaccaataccagcagcagactcaacataagtcgttacgtttgaagtaccggcgatggcaccaattgaagtaccaatcaagtctgaataaagagccttgtccaacttagctgattggtgattttcaccatttgtcgctacgataccaactttttcacctgtaccgatcaaggtaccaattgtatcaaaaatatctgtcaatgaaaaggcaagaatagccatcagagtttcaggcaagcgagctgtatctgaaatcaaagctcccaaaccttctgaaccaagagctgcaccaaaaactgtcttcaagtcttcaaaggctgcaccaacatggttattagcaaaatcgatactagacaaatctaccaaaccaactgcaatagcaagaatagttgttgtcaagatagaaaggataattccccctttaatccctttaatgacaaagaagatagtaatggcaagtcctgcaagagccaccaaaacagctggattattaaagctgaccaagcctggaactgctgaagagtttgctgcaatcgttgcttgagctttgtcagccccttctcctacaacaatatagttgcctggatcaatcgtaaatttcaaaagtccagcattcttaattcccacgtaggcaaggaagacaccgataccagctgaaatagctgagcgaagggcatttggaatcgattcaatgatcattttacgaacatttgtcaaagtgataatcaatgagataattccacagatgaagaccatagctagggcttcttgccaagaataaccgagtccaaatacaactgtaaaggtaaagaaggcattaagtcccatacctggcgcttgggcataaggtaagttagcgtagaaagccatcatcaaggtaccagctactgcaccgataatcgttgcgaggaatacaccctgagcaggcattcctgtttgcgaaagaatttgtgggtttacaaagagaatataactcattgcaaagaaagttgttaaaccagcgagaacctctgtacgaacgtctgtaccgttctcttttagtttaaataatttgtccattatcaatctccttttaatttttacgaacaataatagaattatatcatttatcattcactttttcaacatctttgtttgatttatttaagaaattgatctaatttcattttttgtttggaatctgcttttctgcctgctttctgttataatagaaaacatcttatctgaaaagacactagaaaggtccctatgacgaaaaaaattattgcagttgacctggatggcaccctgctcaactcagacagtcaaatttctgactttaccaaaaaaaccaattaaaaaagttgctgaaaaaggccatcaggttattattacgacagggcgcccttaccgcatggcaaaagatttttaccatgaactaggcttagacactcctatgattaatttcaacggctccctcactcatttaccagaccaaacttgggactttgaaaagtgtttgactgtagacaaaaaatatctgctagatatggttcgacgttcagaggacattcaagccgattttatcgctggagaatatcgtaaaaaattctacattacaaatcctaatgaagaaattgctaatcccaaactatttggtgtagaagctttccagcctgaagatcaattccagcctgagttggtaaccaaggatcctaactgtattcttttacagaccagagccagtgacaaatatgccttggcaaaagaaatgaacgccttctaccagcatcaactgtctatcaatacctggggaggtccgctcaatatccttgagtgtactccaaaaggagtcaacaaggcctttgctttggactacttgctcaaggtaatgaaccgcgacaaaaaagatttgattgcttttggagatgagcacaatgataccgaaatgctcgcttttgctgggaaaggttatgcaatgaaaaatgccaacccagagctactcccctatgcagatgagcaaatttccttgacaaatgaccaagacggggttgccaaaactctgcaagatttattcttatagttcattctgaccagcttgcaagctggtctttgtgctcttttcacagtctcatcaaccagttaatcaattattctattttttacctccaaaaccttggaaaaggctttcttttgtgatataattcacatataaatacaagagaactcgtcatactcgactctgttgacacaaaatcaatccagtcccgttatccctgttctcggtcaatatcaaggaggatagctatgaaagctgttgttgtaaatccagaaagcactggtgttgctgttgaagaaaaagtactccgtccacttgaaactggggaagcacttgtagaaattgaatactgtggtgtttgccacactgacctccacgttgcccatggtgactttggtcaagtaccaggacgtgtcctaggtcacgaaggtgttggtatcgttaaagaaattgccccagatgtgaaaagccttaaagtcggtgaccgagtcagcgttgcttggttctttgaaggatgtggcacttgcgaatactgtacaactggtcgcgaaaccctttgccgtacagtgaaaaatgctggctactcagtagatggtggtatggctgaacaatgtatcgtaactgcagactatgctgtcaaagttcctgacggacttgatccagcccaagcctcttctatcacatgtgctggtgtaacaacctataaagccattaaagaagccaaagttgaaccaggccaatgggttgttctttacggcgctggtggacttggtaacctagctgttcaatacgctaaaaaagtattcaatgctcatgtcatcgcagttgatatcaataacgacaaacttacccttgcaaaagaagtaggtgctgacattgtgattaacggcctcgaagttgaagatgtacctggactcatcaaggaaaaaactgatggtggagctcattcagctgtcgtaactgctgtgtctaaagttgccttcaaccaggctgttgactcagttcgtgctggtggtcgcgtagtcgctgttggtcttccttctgaaatgatggaactcagcatcgtcaaaaccgttctagatggaatccaagtcatcggttctcttgttggaactcgtaaagacttggaagaagccttccaattcggtgcagaaggtttggtagttccagttgttcaaaaacgtccaatagaagatgccgtagcaattttcgacgaaatggaaaaaggtcaaatccaaggacgtatggtactcgacttcacccactaatctaataaaaacctattttaaaagttggaatacgcttccaacttttttatattaaattttttaataaggattcaaaaaaacttctctaaaactcaatatatcaatattttcagatgtaatctttttaattattttatgataaatagttgatttttagatgaaaacggtttatacttaaaaagtcttaaagttttcttaaacgaaaactaaaacaaaaaggaggaatgacaataatgagtatcggaatcattattgcgagtcacggcgaatttgctgcgggtattcatcagtcaggttctatgatctttggtgaacaagaaaaggttcaagttgtaacctttatgccaaatgaaggtcctgatgatctatacgctaagtttaataacgctgttgctgcatttgacgcagaagatgaggttctagttttggctgacctttggagtggatctccatttaaccaagctagtcgcgtgatgggagaaaatcctgagcgtaagtttgccatcatcacaggacttaacttaccgatgttaattcaagcctacacagagcgcctgatggacgctgctgcaggtgtagaaaaagtcgctgctaatattatcaaagaagccaaagatggcatcaaagctcttccagaagagctcaatccagctgaagaagttgcaagtgctacagctactccagttgcccaagctgctatcccagaaggaactgttatcggagatggaaaactcaagattaaccttgcccgtcttgacactcgtctccttcacggtcaggttgcaactgcttggactccagattcaaaagcagaccgcatcatcgttgcttcagataacgttgccaacgacgaccttcgtaaagaattgattaaacaagcagctccaaataatgtcagagctaatgttgttccaattcaaaaattgattgaggtttcaaaagacccacgctttggagaaacacatgcccttatcttgtttgaaacacctcaagatgcccttcgtgcaatcgaaggtggcgtgccaatcaagacccttaacgtaggatcaatggctcactcaacaggtaaaacaatggtcaacaacgttttgtctatggacaaagatgacgttgctacatttgaaaaaatgcgtgacctcggtgttgaatttgacgtacgtaaagtaccaaacgacactaaaaaagatttgtttgacttgattagcaaagccaacgttcaataacaaatatcaaactatagaagaatcctaagaaaatttttcactttattatcattaaatagaaaaggaataaaaccatgtcagatatttcaattatttctgctgtcttggttgtagttgttgccttccttgcaggtcttgaaggtatcctcgaccaattccaattccatcaaccaatcgtcgcatgtacccttatcggacttgcaactggtaacctcgaagcaggggttatgcttggtggatcacttcaaatgatcgcccttggttgggcaaatatcggagctgccgtagctcctgacgctgctcttgcatctgttgccgcagcaatcatcttgatcaaaggtggtaactttactactgaaggtatcgccgttgcaacagcaacagctatccctcttgccgtagctggacttttcttgactatgattgttcgtacaatctcagttggtttggttcacactgcagatgctgctgctaaagaaggaaatattgcggctgttgaacgtgctcactttatcgcacttcttcttcaaggtcttcgtattgctatccctgcagccttccttatcgctatcccagcttctgccgttcaagatgctcttaaattgatgccagaatggttgaacggtggtatggctgtcggtggtgctatggtcgttgccgttggttacgctatggttatcaacatgatggcaactcgtgaagtatggccattcttcgcaatcggttttgcacttgctgcgatttctcaattgactttgattgcccttggtgtagtcggtgttgcccttgccttcatctaccttaacctttcaaaacaaggtggtaacggtggcggcggagctgcgacttctaacgacccaatcggtgatatcctagaagactactagaaaggggaacaatcatgactgaaaaacttcaattatcaaaatcagatcgtaaaaaagtttggtggcgttcacaattccttcaaggttcttggaactacgagcgtatgcaaaacttgggttgggcttattcattgatcccagctatcaaaaaattgtacactactaaagaagaccaagctgctgctcttgagcgtcaccttgaattcttcaatactcacccatacgtagctgctcctatcatgggggttactcttgcacttgaagaagaacgtgcgaacggtgttgaaatcgatgacgctgctatccaaggggttaaaatcggtatgatgggacctcttgctggtatcggtgacccagtattctggtttacagttcgtcctatccttggagctcttggtgcatcacttgctgcatctggtaacttagttgggccacttctcttcttcttcggatggaatgcgatccgtatggccttcctatggtacacacaagagtttggttacaaagctggatctgaaatcactaaagatatgtctggtggtatcttgaaagacatcactaaaggtgcttctatccttggtatgttcatccttgccgtccttgtacaacgttgggtatcgattaacttcactgttaaccttcctggtaaacaattggctgaaggtgcctacatcaaattcccagaaggacctgtatcaggtgctgaattgaaaggtatccttggtcaagcacttggtggattgagcttggatagcgttcaaccacaaaccctgcaaggtcagttaaactcattgattccaggattgatgggacttctccttactttcctttgcatgtggttgcttaagaaaaaagtatcaccaatctcaatcatccttgcactctttgcagtaggtatcgcagctcgtttcttcggtatcatgtaatcttggtgagaatgtacaaacaaaaaaagaatcaggtttatcacctgattcttttggctctttgtcaaatagtgttgatgaagaacctaatgaaaaaagaatccaacaaaaattggactacctgtctccggttgaataccgaagacggtagccctagggtgtttttattaaattctcactttttggggtcagtccctaagcctgatagtaattttttgttcatactattcccctttagtcatttactactttaagttgcattgctttagctacttcttctgcctttgatcccttaggtgtatggatttctacatctgggttacagttatccacaaaatagaagtattctgtaatttctgttacacttgctggaattgtaatagatttaattgatgatgtcccccaaaatactaatgttccaatactctttgttccttctgggaatacaactgattctaatgaactatcagagttgaaaacatcatcttctactgtttctattgacttaccaaagtggacatactttaacttattgtcaatcgtaaacgcaccttttccaatatatcgtactgtatctggtaaaacgattgcctcacaatgtttcaagttcgcaagaccacgttctccaattgcgataacaggtttacctttaatttcctttggtacacgaacaaccttatcgtcagaagtacaactatagatgacataaccttcttcccataaatataagcatgttaatatattaatatatttaaggatttataactatagttccttaattttcccagtaaaaaaacgaaaggcaccacaagttatttatgtgttttctttaaacgattcatgtacttctgtcgcaacttctcacccgcctttaattgcggttgcgatagattgaggacctaaatatgcatcccctgttattagttcatttctattgtattctgatgttgaccgaaagtcaaatttttacctttcatctagaacactaaagtctacttttgttcaattgctgcaacgacaaggtcacatggaataatatgttcactacctgccacttcatgcgttgatcttcttccactttcatctgattcaccaagttccattgtaataacctttacaccagttactttcccactctcatcacgcaatacttctttaatattctctaagaaatggaatgtaacaccttcattgtgtgcatctttgatttgtagtgtagcttctagtatattgttcatatggtcatcattcttttgttttaggtttcagcgcttttaatataatggatgttggcctttttgtatacactaaaatagggttggtggaaaatttccatcaaccctaaaaattatagaaccacacaaaaccctgaccagagatggccagggttttgtatttcaaaaattattctgtaaattctatagttacttttacttcagaatccattgaagaaaatattgttttataataattgattgcagattctttaatttcactcttaaatttatctaaatactctgcttgtttatcactagaaagttggttagcgaccaatttcccagtatcaatatcttctgtagttccacttaataactctccatgactatcatataaatcataaggattatcttttgaaagttcaacaccaattacttccaattttggaacaataaccttatattctttttcgcttatttgttcaacctttacactacttttaattccaaatttagctttataatttaaaattactaatgctgcttttttagagaacggcacatcaaacccaaaaacttgagttgtttttgtttcagaaataatttcattaattcccgcattcaaaaatacaacttcattcactttttcaatactttcgatattaattgacgatttgacttctgatttatgttccttaggtaagaaaaatagcactccaatagctataatagctattaataccacattcaatagtacactaaacatattaactttcttctttaatatagacaagataaaaaaacctcactttaaataatctatctaaattttacacattctaaagaaaatagtcaatattttttcgtactatcttctaaaattaattgtgcctattaaaaatgaaattagtttgttgcatttgattatattttttgaacaccaaatccatttaaaattgagtgctattttgagcactaaaaaagggctctttgtcaaatagtgttgatgaagaaatttaggaagggattaagcaactaattgttgcttaattcctttttgttttgggccaaacatttttgttattaaaataatcctatttctaaaatggtaatagtttctaaagccgtaggcatttcttttaagcacttttattttattgtttattccttcaatagggccatttgttctagttggatactcacaagtattttgaatatatggcaagtaagtcataagagtctttaatactctttttaaaccaggagataggtctaattgcgtagctgcttcaatcgtttccttgaattctatataatctctatcctgtatacattcacgaagtgaatgtacaacctcataatcatttttaagagatggatttttttctaagatataatctacgattcctttacttgttatgaagctttcaaaaagcttataacgattatatttatagttctgaagttcattagagttctttaaaattaacttccaataatgttttaactttcgatataatttagagtctttatagcgatgcttattcatgacacgtacccgagttcgatttaattctctatttaaggcttgtacgatatgaaaaggatcaatgataattttagcgttaggaaacatttcttttattaattgaatgtacggtaagtacatgtcgatggagatagtttttacctttaatctagtcttaggctcaaaacgatgaaaatactttttcaagctgtaagattttctatctcgtacaacatcgaccagcttgtgtgtagtgctatcacaaataatgaagctcatattactatcggaagatttgacggatttaaattcatcaaaacacaaatgctcaggtaaatcgtgtaatggtttaatctttagtaaacgtgttgtatcatctatgatacgtcttaccgtatgaactgaaacatttgtttcttttgcgatataggtttcagatactgtttcacttatttttgatttaatttcgttttttaagcgtttagagatatgacagtgtttttctacgattcgactagtgtctgcggtaaatgaagagccgcattctctacagagaaatctctgcttgcgtagatttaagtaggccgctaggcctgaaacagaacagagagtgatacgagatgttttcgtgccgtttttaacgatattattatttcggctaacacacccacaaacggtacaaaattctggtttatgcgtataagtagctgcataaaataaagattttctctttttaaatatcttctcttgaactttattatcccaaataatgtttttatctttgatttgtagtgtagcttctagtatattgttcatatggtcatcatccttttgttttaggtttcagcgcttttaatataatggatgttggcctttttgtatacactaaaatagggttggtggaaaatttccatcaaccctaaaaattatagaaccgttctttttatatctcatttattcagccaaggcacccattggatcccatggtgcaaggacgattggttctgcttcataggcagcttgttcttctgctgttagtaattccttacgaacaacaatttggtaagtgtactcgtccatccaagcatctgaggcaacaaagtacccatcggtaccgaccttgtctccccatgagttttcaaccttccacttggttgacttcccattttcgtccaaatcaacacctgtcaagaccatagcgtgggtcattaagctttcactatagtccagacgtccagccttgtcttgagtgaattgaatatccatgcttgattcaaagtcataaacatctgtcgcaaggattccagctttacggttgctgagctgaccaacatcagaaccaaaccaaacagtctcacctgcttgcatttgagcaattgccaattctttcaagcgatccatcggcacgttgatgtaacgaaccgcacggctaccaaccacattttcccaacatctcaactgtgtaagaatttgccgtatggtttatcagcagttggagcattgataacagaaacgtagtcttctagaggaagatttacatatttcttgtaaaactcttgtggtgtaatgtccttttcgctttggtagttgttgtctttatcgcgataagcaaagtcaaactgacgtggtggaagacccaatgacatagcaaggaagttaaaaatttcttgcaagaggtcttctttcttagcttgaacagtcgcttggtctgcaccagaagcaagcaagtcacgcaagatttgagcatcttgacgaagcaatttgttgagaatggcatttagttcacggctgctactagatgaaacagactcaggataaacagacttaggtacgacaccgtatttctcaaagagagaaacgaccatatcccactgaccgccatcttgttgtggtgtttggagtagaaatttaaccttacggctcgtcaagtcttggtctgcagtcgcaatgacttgttccaagaaccagtttgatttctcatacttgtcccagaagaaagtgtgggcctgtgacaactcaaagttttctagtttgtattgtgagatgagcttgtggcggaaagtgttaagggctgcaaacatccagcaacgaccagaagccttctggttagttactttgtccttggtcaaatccaatgagaaaacaggggtgttgtctacatggctttggcgacgttctagggctgcaaaaattccgttgtggctggcagcattttcaatcgcttggtattttacatttgcttcatagttggcaaataatttatcagtaaatgattcttgaatcgcgttcatagattcctccttttattctacagtctattataactcttttcacaaaggaagcaactgaaaaacataaaaggcgaggacattctccctcgcctttttcaaatataaaccaaattaagcaatactagcaagaagattttctaattcctccttggtcaagcgacgccattcccctcgttctaagttctcatccaatactagcgttcccatagtcaaacgttgcaagtctactacttccttgccacagtagcccaccatacgcttgacctgatgaaacttcccttctgcaatggtcacacggatttggctttgatttttttctgtatctatggatacaagctccagtctagcgggttgacaggtaaagtctttgagaggaataccctcagcaaatatatccacatctccttgggtcataattcctttgacctgaaccagatacgtcttgttcacatgacgcttaggtgaaagaagagcatgggccagctggccatcattggtcaagagtagaagaccatgtgtatcaatatccaagcgtcctactgggaaaacttccttgctccgagcaatatcatccagcaagtccagaacggttctgtgcttgggatcctcagtcgctgaaataaccccttggggcttgttcatcatgtagtagacaaactcttcatactccaacactttcccatcaaagcgaatctcatctctttcttcatcaatctgcaatttagctgacttttcttttttaccatttaccgtcacgcgaccagccttgagcaagtttttgacctcagttcggctccccacagcgcaggcaactaaaaatttatctaatctcatagaactattatatcatactcaaaaggaggctggtacaatgaccaacctccttttcgtttcatactcttcaaaaatctcttcaaaccgcgtcaacgtcgccttgccgtatagatgttactgacttcgtcagttctatctgcaacctcaaaacagtgttttgagctgacttcgtcagttctatctgcaacctcaaaacagtgttttgagctgacttcgtcagttctatctacaacctcaaaacagtgctttgagcagcctgcggctagtttcctagtttgctctttgattttcattgagtatcagatttaagaaattaacttcctcgtctccagaaaatcgctaagacaatcatggaacctagtactgccggaataatggcagttcctgctattatcggtccccaagtcccaaaaagcaagtgccctataaaggcaccaatccagcctagaaacattttcccaaaacatcccatgcgctctccacgattggttagagtacctgctaaaaatcccactaggagaccaacgaacatacttcctaacatattatctccttaatttgcccaatctccgttacggaagagtggtacacgtgtcccatcctcacggataccatcgatatccatttgactagacccaatcataaagtccacatgaacatctgaacggttaagccctgcagcttcaagctcttcttcgctcatctctgctccaccaacgacgctagtcgcataggctgcaccgatagccaagtggtttgaagcattctcatcaaaaagggtgttgaagaaggtaatgcctgactgagaaattggacttggatctggtaccaaggcacattcacccaaggcacgcgcacccgcattttcaaagacaaggtctttcatgacttgatcgcctttttctgcagcaatatccacaatttgtccatccttgaaggttactttaattccttcgatgatatttccattatagctaagcggttttgtagaagtgacataaccatctgcgcgacggaagtcaggtgctgtgaatacttcctctgtcggcatattcggcaagaatccttcaccctgcgcattgatagcaccagctgattcccaaacgtggttcttcggcaagccaagtgtcaaatcagttcctggtgctgtgtaatgaagggctgaaaattgttctttattaagcatatcagccttactcttgaggatggctgcatgctcttcccaagccttaacaggatctgcttcgtagacacggcaagttttgaagatttggtcccataggagatcaactgcttcttcgtcgctagcagcatttggaaagacttttttagcccactcaagtccagcagcagctgctaccgtccagctgaccttgttggattgcgttgcaatacgcattggcttcatagcaagtcccatagctttagcagaagctgaaagcttgtcagcatccactccgttcaaggcacctggatcagaagaacggacaccaagacggctagccttgttctccaagagatagttcatctcagcaatcttatattctggcacattgtccagacgctccatcggcgcatggagaaatttctcacggttaatcacatcatctgtccactgaacaataacctcatgcgcacccaaggcgtaagcttctttcacaatcaaatgcgccaactcgcgttgctccacatcgatagaaagagccaaagtgtgaccaggttgcacgttgattccattcgcaaccaataatttcgcatatttttctagattttctttaaaatttggtaaaaccattctattcttccttttctatttttatttttctttcaaagcagaaaataatcctgccaaagcaatagcaccagacaaaaatgctgttgatagaagtattgtctggtcagcaagttccaattgatactcaaacaccttctcagccggcttgtcttccgcaaagattcttagtttcatcttttttcctccaagaccttaaaacaactcatcaaacaaactgagctggttatcctctggcatattgcccagaatccccatttcatccatcttttcaaccaaggtagatgagaggccaccgcgtttgcgtagttctgttttggagaggaattctccctcttcacgcgctcgcaccaactgcttagcaacgttctctcccagaccatccattgctacaaatggtggaatgagggtatccccatcgatgaggaactctatcgcctgactacggtagagatcgagtttaccaaacttgaaacctcgttcccacatctcattgacaatctcaagagttgtatagagatcaatttccacattagaagcctcattgttcttccgtttttcagagatttcttccattctgcgcttgatggcatccaagcccgcacccatagtcttgatatcaaaggctttagcacggattgagaagtaagcacagtagtaataaataggatggtgaaccttgaagtaagctacacgcaaggccatcataacgtaggctgccgcatgggctttagggaacatatacttaattttcccacaggattcgatataccactctggcaccttattggccttcatagcttcgatatagccatttctctcctcttcggaaatcttgagccacaagcccttacgtacccgttccatgatggtaaaggccatcttaggttcaagaccagcatgcatgaggtacaccatgatgtcgtcccgacaaccgataacggttgataggtccgctattccttgcttaatcaaatcttgggcattgcccagccaaacgtcagtaccgtgggacagacctgagagctgaagcaactccgcaaaagtcgtcggatgcgtctcatctaccatcccacgtacaaagttggttccaaattctggaatccccagcatgcccgtaggcgttccaatttgttcaggtgttaccccaagcacatccgtcccagaaaagagggccatcacaccttcgtcatccatagggatttcattaggatcaatcccagacaagtcctggagttttcgaatcatagtcggatcatcatgtcccagtacatcaagtttgaggacgttctcgtcgatatcatggaagttaaagtgagtggtctgccattcagcggtcacgtcatccgctggatactgaacaggagtaaaatcgtagacatccatgtagttcggaataacaacaattccccccgggtgttgacctgttgtccgcttgacacccgccgctccttgagcgaggcgttctacctctgcatcacggtaaaactttccatagtcccgctcataacccttgacaaatccataggcagtcttggcagctaccgtaccaaccgttcccgcacggaaggcatattcctcaccaaagatatcacgcacatccaaatgggcgctaggttgatcttctcccgagaagttcaagtcaatatcaggaaccttgtctccatcaaaaccaaggaaggtttcaaacggaatatcctgcccatttttgctgagtttgtgaccacactttgggcagtccttattaggcatatcaaatcctgaaccgtacgaaccatcggtgataaactcactgtattgacattgaccacagacatagtgaggagagagaggattgacctctgtaataccaatcatggtcgcaacaaaactagatcctacagacccacgagaaccaaccaagtagccccgttcattggaacgtagcaccagcatctgcgatgccagataaatcacggcaaatccattccccagaatggaagtcaattctttttcaatccgcaaatcgacaatatctggcagcggatttccataaatctcaaaggccttcttataggtcaactcggcaactgtttcttcagccttgtcgatgaaaggcgtatacaagtcccccttaacaacctcaacaggttcaaagatatctgccaaggcattggtgttttcaataaccaatttccgagctaattcctctcccaagaaggcaaattcatccaacatctcattggttgttcgaaaatgagccttcggaagaggagctggttgggcatgttccccatgaccgatagttcggttaaccatagctccctgtcccaaactacggacaataatttcacggtaaatttcttcttctggttcgatatagtggacatttcccgtagccaaaacgggcttaccaaggcgttctccaacctctatcaaacttttgataatggtctggagttcttccatatccttaacctgctccttggcaatcaagggagcatagatagctggtggcatgacctcgataaagtcataatacttggccacctcaaccgccgcatccacgccctgggaaacgactgcatcaaaaacttcaccttctgcacaggctgagcctaaaatcaagccctcccgatgggcatctagaaccgttctcggaattcgtggcaccccttcaaagtatttggtattggacaaagaaaccaacttaaagatattttttagacctacctgattcttgacataaatggtcgcatgcttgattcgagcttttttataagaatctggactaaccaaatcaatattgagtctagctagatcggtcacaccatgtttttctgctacttctttgataaagatgaaaagcaggcgacctgtagcttccgcatcgtagttggccatgtggtgatgctctaaggccacaccaaaacgcttggtcaaaggccccaaaccatgacgtttatactcaggatagagatttctagcaaactcgagcgtatcaataactggctgactaatctttggcagaccatgacgttcatagttggcattcataaagccaacgtcaaaggtggcattgtgggcgactaggaccgtatccttacaaaattcttggaattcttgcaaaacttgttccagtggcttggcatttttgacatgatcatctgtaattccagtcaactcagtagtaaaagctgacaagggatgcccaggattgataaattcatcaaattcagcaatgacattccccttgtacatcttagaagctgcaacctgaatcaagtcattatagatagctgaaagtcctgtcgtttccacgtcaaagaccacgtaggtcgcttctgacaagtccatctccacttcgttatagacgatagggacacggtcctccacgatattggcttccattccatagattagctggattcccgctttcttagcagccttatagccgtgtgggaaggactggacattcccatggtccgtgatggcaaccgccttgtgtccccacttagcagctgtcgcaacgatttcttcgacctctggcagagcatccatagtcgacatgttagtatgagcatgaaactcaactcgacgctctccttctggcatcaaatccttccgctcatagtgaacaacttcctgcacatcctgtacgttcatagtcaaatcacgtgtgaagttattcatctccacattcccacgaactcggagccaagaatttttcttaattaggtcaaacttctgggcctcttcctcgttcttaacccacttttgcatagaaaaacttgaagtgtagtcagtcattttaaagttgatcaaaacacgccctgttctggtcactttttgctccacatcaaaaacaaccccttcaaagaccagacgattttcctccgtcgtcacttcgatcataggagtaatctctgccttatccagcttgggtttagctgcagcttttttagcttgaaaatcaaaggatggtttctcttccgctggaggaggtgccatctgttctagttgttccatagcacggagcgcttcctcattggccgcttgaacaatctgctcattttcagcttgaaaggcttcttcctgctcatgagtcagcatatcattcttctctacttgacagttaaaagttggaaatccaaatttttcaagttgtttcgctaaattaggaaggtgattcttcttaaagtgttccttatcaatcgcctcggaaccttcaataaagagttggttcccctccgcacgaacttgcaaattttgataaagggacttaaaaccttgactcgaacacggaccttcagaaaaagcctctctatagtaggactgcaagagctgatttgaaaattcttgagacagagtcttgatttcgaaaatagctttattgcctgtcttaaaaaattcttccctcaaacctttctttaattctaaaaagatttcaatcggtaaaatattagaaaatacgaaatgaaactccaataccttactaattttatgaaccacaactcgctcaatatcggcctgtgctaaagcaggagcctgtctcatttcagcaggcatccccagttgattcatcaaaatttcaaaactatttgacattcattttcctcacattattctcctactattttaccatacttagaggtgttttctaaagacaaaaggaagccactaagtgacttccttctagagtgaggactgattagtcttcacctttgtttttcttaatgatttcttcttgtactgacttaggtacatcttcgtagtggtcaaataccatcatgaatgtaccacgtccttgagatgcagaacgaagaactgttgcgtaaccgaacatttcagcaagtggaacgtaagcacgaacgatttggctgttaccgtgtgcttccataccatctacacgtccacgacgagcagttacgtgacccataacatcaccaaggttttcttctggaacagtgattgttacaagcatcattggctcaaggatagctggttgtgctgatttagcagcttctttaagagcaagtgaagccgcaatcttgaaggcagtttcagatgagtcgacatcgtggtatgaaccatcgtaaagcttagctttaacgtcaaccattgggtaacctgcaagtacaccgttagccatagattctaccaaacctttttcaaccgctgggataaattcacgaggaaccacaccaccgacgattgcgttttcgaattcgaatcctttaccttcttcgtttggagtaaattcaatccatacatcaccgaattgacctttaccaccagactgacgtttgaagaatccacgtgcttgagtagaagcgcggaatgtttcacggtaagatacttgaggagcacctacgtttgcttcaactttgaactcacgacgcatacggtcaacaaggacgtcaaggtgaagctcacccataccagagataactgtttcaccagtttcaacgtttgtttcaacgcggaatgttggatcttcttcagccaatttttgaagggcgatacccatcttgtcttggtcagctttagattttggctcaaccatcaattggataactggttctggaacgttgattgactcaagaatgattttagctttttcatctgtcaatgagtcaccagttgtagtatctttcaaaccaacggcagcagcgatatcacctgagtaaacagtgtcaatttcttgacggctgttggcgtgcatttgaaggatacgtccgatacgctcacgtttacctttagaagtgttcaatacgtatgaacctgattgaagaacacctgagtaaacacggaagaatgtcaaacgacctacgaatgggtctgtcatgatcttgaaggcaagagctgcaaatggctcttcatcagatgctggacgagtttcttcttcatctgtatctgggttgatacctttgatcgctgggatgtcaagtgggcttggaaggtagtcaataaccgcatcaagcatcaattgaacacctttgttcttgaaggcagagccacacaatactgggaagaattcaacgttgatagtcgctttacggataccagctttcaattcttcgttagtgatttcttcaccttcgaggtatttcatcatcaattcttcgtcagtttcagcaactgcttcgatcaatttttcacggtattcttgagcttggtcaaggtattcagctgggatgtcttcttcaaggatatctgtaccaaggtcgttagtatagatttcagctttcatcttgatcaagtcgatgataccacggaagtcatcttcagaaccgattggcaattggattgggtgtgcatttgcttgaagacgatcgtgaagtgtgcttacagagtaaaggaagtcagcaccgattttgtccattttgttggcaaatacgatacgtggaactccatactcagttgcttgacgccaaactgtttcagtttgaggctcaacacctgattgtgagtcaagaacggtaacagcaccatccaatacacgaagagaacgttgtacttcgattgtgaagtccacgtgtcctggtgtgtcgataatgtttacgcggtggttgttccattgagctgttgtcgcagcagatgtgatagtgataccacgttcttgctcttgctccatccagtccatttgtgacgcaccttcgtgagtttcaccgattttgtggattttaccagtgtagtaaagaatacgctcagtagttgttgttttaccagcatcgacgtgagccatgataccgatattacgagttttttcaagtgaaaattcgcgtgccatgaggtttgtttctcctatttatttttgatttctattctattataacatgattttaataaaaacggataggcaggacctacccgttctcaatgttttcatgctattgttggtttcaacttgtagatttacaagttgaattgaactcgggctaaagttaattagccgatttgagccggaacgggatgctgtgtgaaaaagataaacttccttgtattcgtcgaatactgcgtcagttttctattttcaccttgcatccttaccgttcctagcatcatgattttaccaacggaagtgtgcgaatgcacggttagcttcagccatacggtgagtgtcttcacgtttcttaacagctgcaccagtgttgttagcagcgtccaagatttcttttgcaagacggtcttgcattgtgtgttcaccacgaaggcgagcgattgttaccaaccaacgaagtccaagtgttgtacgacgttctggacgaacttcaactgggacttggtagttagaaccaccaacacgacgtgcacgtacttcaagtacaggcatgatgttttccatagctgtttcaaatacttcaagtgcatcgtttccagtagcttctttgatttgctcaaaggcaccgtaaacgattgaagcagctgtaccacgtttaccatcaagcataacgcggttgataagacgagtaactagttgtgaattgtaaagcggatctggcaatacgtcacgttttggagctctatttttacgactcatttctctttatcccctttccttatgcttttggacgtttagtaccgtatttagaacggccttgtttacgatcgttaacacctgcagtatcaagtgcaccacggacgatatggtaacgtacccctggaaggtcttttacacgtccaccacgaagaagaaccacgctgtgctcttgcaagttgtgtccgatacctgggatgtaggcagtaacttcgataaggttgctcaaacgtacacgagcgaatttacgaagggctgagttaggttttttaggtgtcattgttccaacacgagttgcaacaccacgtttttgtggtgaagaaacgtttgtttgaacttttttatgactgttgtaaccaacgttcaaagctggtgatttagatttttctacttttgatttacgcggtttgcgaaccaattggttaattgtaggcatctacattctcctgtgtttttttatttttggtgatgatacacttggtgacagctatcatctgtgtgtacttttgcaacatttgtcagcacgtccctgtacactcttgagagaccaaaagtaaaaagtaccgtgtattattgtaacaaaattttcccttggttgtcaagatatttttcttttttattgttaattttagctcttttgtagtgctccctaaaaaagaaaaaggaggaatcccaccctcctaaagttagtattgttccattcaatcccatcaattttagcacataatggttttcgagatatgatagtatcacaaccaaccagattctttagcgatattggctgcctctgttcgattacctgcatctagtttcgaaagaatattggtgacatagtttcggactgttccgttggatagataaagtttgtctgcaatttcttggttagagaagccctgagcaattccctttaaaactgcgatttcttgttctgttaatggattgggatgcgtcatcaccacttccatcaattcaggcgaatactccttgcgtccttctaggacggtgtgcaaggtttgcatgaggtctgcaatgtttctttcttttaatacataagcatctactccagccttgaccgcacgttcaaaatacccaggacgcttgaaggtcgtcaccacaaccacccttgtttcaagcttttctgctcgtatccattccaagacttcaagacctgtcttaacaggcatttctacgtcaaggatggcgatatccacagacgccttttttaatagttggattgcttcttgcccattctttgcttgaaagacagactctacatccggttgaagcgtgagcaactggcacatggcatctcgcaacatactttgatcttctgcgactaatactttcatctactttctctccttataaggtagtcgaacctgaactactgtcggttgtttctgactaattacctttacttctcccgaaaatggaagaacacgatctcgaactgtatggaggtcatccccctttatagaagtaaagccacagccatcatctctcactgttagaatgagttctttctctgtccgttctaattttaagtagactttagacgctttagcatgcttgatgatattggtcactaactcaagcaaaatcatggaagccgttgactccaattcctgagtaaggctagcggtatctagttgattagccgtttccacctcaattccagcaatctctagcatctttttgacagtttcaagttctgatgctaaggtccgtgatttcagattttccacaatggttcgcacttcattcatggaatccttactgatctggtgaatttcttttaattccttttccacctgtggataagcctccatctgaaacaactgcaaggctaaatctgtcttgacactcagcatagcaaaagtgtgtcccagactatcatgcaaatcctgaccgatacgactgcgttcattttcagcaagcaatagatttatctgggcattttgcttagcctgcgcttctttcaaatcctccacaatccgaatccgaaccaatccaaaagtcattaaatcgacaaaagtaagaattacaagtagatagaatagaaactcaacttcgattctctgaaaaatcaaaagttggcccacaacaaggacttgagcaagaagaaaagtccagacatgtaaagactttaaactacgtacgccaaaatgataacttaagaggttagaaaggaaaaagaagaaccagatataattaacagcaacaaaggcagtattcccaactacataagtcagcatgagaccccaatatatccaagataggcgctggctcttagttgttaaaacacccaaatatgccactacaaatagaatatcaatgaataaatgccagacagaaagccacccagtcactacaggtaggatggggaaaatcataaaaattaaactggcccaaaacatatagtgtatgcttttcagtctttcaagcattaagaattctccttatgaccttgaaggtaaatggtcaaaccaaacaaaactgctgaaaaaacaagtagataaactgtggctgatagattgatgccaccctcgtttaagaaggtcttgagcaactccatcaactgataggttggtaggcacttcccgattgcttgcatccagtctggaaataaagagatgggcatccagagtccacctaacacagccaagcctagatagagaagattgcccactacagacatcagctgactagacggtaagagtgtcagggtcaagccaagtgctacaaaggctatacttcccgcaatcagcaagagcgcagcccaaatccagcttcctaaaggcatatccacacctctaaccaagtgcccaactgagaaaacaaccaggattgagaccaaataatcaaccatcatacttgttatctttgatagataatattctaccatatttaccggagtatggcgcaatgttttctgccagttgttgattttatcggtatgtaagacagctggaaatgaaaacatggctgtcgacatcatggaaaaagccgtcatggagatgaggtaatcacgcataaaattagctggtccaccgggtgtgtcctggtacatgcctgaaaagaataaatagaaggctgtcggcatacctactgataataaataatagactaattgtcgtttggtcaatagaaattctatcttgtttagtgcgatccatcgtttcatcttagtcatctcccttttgtgtttcttcaaagattgtatccaacaaactacgattattgacttcaatttcttgaatcctacatcctgcttgcactaacagttcccagaaagcatttgcctctcgtgtgactacttgcagagcatcttgtttttgtacccacctttcaaccaagtttgactgctcaacgacttccttgtaagctagaggaaggataaaatgcttttcaatctcctcactacgcatagcaagaggcgtcgtgtcacgaatcaattcacccttgtggagcaccaagattcgatcagccgtatgctccacctcttcgatatagtgagaagaatagacaatggtgactccttgcgcttttaggtcccgaacaatttcccaaaaacgttgacgagtagaggtatccatggcagcagttggctcatctaaaaaaacaagctttggtcgcccaattaaggtcaagacaaaagagaaaagacgcttttgcccacctgataatttttctgcaaattgctctttttgttgcttatcaaactgcaatagttgatcgatttcctggttactcaagtgatttggataaattttttgaaagaaaacaatcaactcttttacctttagtttctgaacgattacattctcttgagggaggtaggatcttgtatagtctaacttagagctcgttaccggcaaatcttggatagatacttgcccactggtgaccagtttatctccaagcaaacatgccaaaagtgtcgtcttcccagcaccattgggaccaatcaaggcaacacattcaccatcgttgatttcaaaagagatgttccgcaagatctccttgtcttttattttcttacacaatttctcaactttaatcacagtcatgagattctcccttcaaccactccattcccatagggaaaacgacgaaaatcataaatcctagtccccaggcaccacggatgaattggtgaaggaaggcttgatcaaaccaacctgtaaacatttccaccaaccataccactagtgatagtccaataaaaagatagagaaacgcttttttcatttttcaaactcctttttcacatcactgactaatttcaaaccttctctgataagccaagacatcattccaaagccagcaaagagctcccaaggaaaatggtagaaaccctcatccaaccctgaaaacatgagataggtcataactcctgctactactaaactcactgctataatcattttatttctcatctcttcttcctccatttcatacttcaattatagccttttgaagttagcggagctagatgcttctgtcactaggaaatatgacaaatgtcataaaagattctgttcaaaacaagaaagatacactatacaatgaaacacaagtagaaaaacctaaggcagcttcctcaaaagaaatatcaaacccaatccacactataatgtaaactaatacacattcaaaatcaaaaaagcagaaatttttatcatacaaacacatatattatacgttgaacaaaactcttctattgctttcttaaaaatttataagagttataaaatctgttaaatttcaatgtgtataattaactactgtatttattaaacgatttttattaaaatcattatataaaatgaattactaaaattcttcaacacactacagttgacaaagaaacaaaaaagagagaaccaaactgattccctcttaatgtatataatatcggctctataatatttgtagtgggtaaatcccctataaatattatggagcctatttttgtgtagaaaaaaagtcccatatgacctataatgaaaagtgaccaaacaactcattagaaagattcatatggaacaattacattttatcacaaaactactcgatatcaaagaccctaatatcaaatttatggatatcatcaataggaatactcacaaagaaatcatcgctaaactagattatgaggcaccatcttgccctgattgcggaagtcaaatgaagaaatatgacttccaaaaaccgtcgaaaattccttacctcgaaacgactggtatgcctactagaattctccttagaaagcgtcgttttaagtgctaccagtgctcgaaaatagcggtcgctgagactcctctagtaaagaaaaatcatcaaatccctcgtatcatcaaccaaaaaattgctcataagctgattgaaaagacttctatgaccgatattgcacatcagctttccatttcaacttcaactgtcattcgaaaactcaatgacttccgttttaagcatgatttttctcatcttcctgagattatgtcctgggacgagtatgcctttacaaagggaaaaatgagtttcattgcacaagactttgataatctcaacattatcaccgttcttgaaggtagaacacaagctatcatccgaaatcactttctgcgctacgatagagtcgttcgttgtcaggtgaaaatcattacgatggatatgtttagtccttattatgccttggctaaacagctttttccatgtgctaaaatcgttctagatcgatttcacattgtacaacacttaagccgtgctatgagtcgtgttcgtgtccaaatcatgaatcaatttgagcgaaaatctcatgaatacaaggctatcaaacgctactggaagctcatccagcaggatagtcgtaaactgagtgataaacgtttttatcgccctacttttcgcatgcacttaacgaataaagagattctagacaagcttttgagctattcagaagagttgaaacaccactatcatctctatcaactcttactttttcactttcagaacaaggagccagacaaattcttcggacttattgaggacaatctaaaacaggctcatcctctttttcagactgtctttaaaacctttctcaaggataaagagaaaatcgtcaatgcccttcaactaccctactccaacgccaaattagaagcaacaaataatctcattaaactcatcaaacgcaatgcctttggatttcggaactttgaaaacttcaaaaaacggatttttatcgctctgaatatcaaaaaagaaaggacaaaatttgtcctttctagatcttagcttttcttcaacccactacagttgacaaagagccataatatctagttaaataaaaaagatacgcttgcgtatctctgtactaaatcgggaagacaggattcgaacctgcgacaccttggtcccaaaccaagtactctaccaagctgagctacttcccgagttaaatagaaaaatgcaccctagaggagtcgaacctctaaccgcctgattcgtagtcaggtactctatccagttgagctaagggtgctcattatattatgccgaggaccggaatcgaaccggtacgatcgttaccaatcgcaggattttaagtcctgtgcgtctgccagttccgccaccccggcctctctaagcgaacgacgggattcgaacccgcgacccccaccttggcaaggtggtgttctaccactgaactacgttcgcactgttttcttctatctaaaaatgccggctacatgacttgaacacgcgaccctctgattacaaatcagatgctctaccaactgagctaagccggctcatttattatatcttaatgcgggttaagggacttgaacccccacgccgttaagcgccagatcctaaatctggtgcgtctgccaattccgccaaacccgcatatatgacccgtactgggctcgaaccagtgacccattgattaaaagtcaattgctctaccaactgagctaacgagtctaaaataacttacgttattctaacggtcccgacgggaatcgaacccgcgatcttcgccgtgacagggcgacgtgataaccgctacactacgggacctttgggagttaacgggatcgaaccgctgaccctctgcttgtaaggcagatgctctcccagctgagctaaactccctagagctaagcgacttccatatctcacagggggcaacccccaactacttccggcgttctagggcttaacttctgtgttcggcatgggtacaggtgtatctcctaggctatcgtcacttaactctgagtaatacctactcaaaattgaatatctattcaaaccaagaaaaccttkcgctttcatattctcagttactttggataagtcctcgagctattagtattagtccgctacatgtgtcgccacacttccacttctaacctatctacctgatcatctctcagggctcttactgatataaaatcatgggaaatctcatcttgaggtgggtttcacacttagatgctttcagcgtttatcccttccctacatagctacccagcgatgcctttggcaagacaactggtacaccagcggtaagtccactctggtcctctcgtactaggagcagatcctctcaaatttcctacgcccgcgacggatagggaccgaactgtctcacgacgttctgaacccagctcgcgtgccgctttaatgggcgaacagcccaacccttgggaccgactacagccccaggatgcgacgagccgacatcgaggtgccaaacctccccgtcgatgtgaactcttgggggagataagcctgttatccccagggtagcttttatccgttgagcgatggcccttccatacggaaccaccggatcactaagcccgactttcgtccctgctcgagttgtagctctcgcagtcaagctcccttatacctttacactctgcgaatgatttccaaccattctgagggaacctttgggcgcctccgttaccttttaggaggcgaccgccccagtcaaactgcccgtcagacactgtctccgatagggatcacctatctgggttagagtggccataacacaagggtagtatcccaacaacgtctccttcgaaactggcgtcccgatctcatagactcctacctatcctgtacatgtggtacagacactcaatatcaaactgcagtaaagctccatggggtctttccgtcctgtcgcgggtaacctgcatcttcacaggtactaaaatttcaccgagtctctcgttgagacagtgcccaaatcattacgcctttcgtgcgggtcggaacttacccgacaaggaatttcgctaccttaggaccgttatagttacggccgccgtttactggggcttcaattcataccttcgcttacgctaagcactcctcttaaccttccagcaccgggcaggcgtcaccccctatacatcatcttacgatttagcagagagctgtgtttttgataaacagttgcttgggcctattcactgcggctgacttaaagtcagcaccccttctcccgaagttacggggtcattttgccgagttccttaacgagagttctctcgctcacctgaggctactcgcctcgactacctgtgtcggtttgcggtacgggtagagtatgcttaaacgctagaagcttttcttggcagtgtgacgtcactaacttcgctactaaacttcgctccccatcacagctcaatgttayagatataagcatttgactcatatcacacctcactgcttagacagacacttccaatcgtctgctttagttagcctactgcgtccctccatcactacatactctagtacaggaatatcaacctgttgtccatcggatacacctttcggtctctccttaggtcccgactaacccagggcggacgagccttcccctggaaaccttagtcttacggtggacaggattctcacctgtctttcgctactcataccggcattctcacttctatgcgttccagcactcctcacggtacaccttcttcacacatagaacgctctcctaccatacctataaaggtatccacagcttcggtaaattgttttagccccggtacattttcggcgcagggtcactcgactagtgagctattacgcactctttgaatgaatagctgcttctaagctaacatcctagttgtctgtgcaaccccacatccttttccacttaacaattattttgggaccttagctggtggtctgggctgtttccctttcgactacggatcttagcactcgcagtctgactgccgaccataattcattggcattcggagtttatctgagattggtaatccgggatggacccctcacccaaacagtgctctacctccaagaatctctaatgtcgacgctagccctaaagctatttcggagagaaccagctatctccaagttcgtttggaatttctccgctacccacaagtcatccaagcacttttcaacgtgccctggttcggtcctccagtgcgtcttaccgcaccttcaacctgctcatgggtaggtcacatggtttcgggtctacgtcatgatactaatccgccctattcagactcggtttccctacggctccgtctcttcaacttaacctcgcatcataacgtaactcgccggttcattctacaaaaggcacgctctcacccattaacgggctcgaacttgttgtaggcacacggtttcaggttctatttcactcccctcccggggtgcttttcacctttccctcacggtactggttcactatcggtcactagggagtatttagggttgggagatggtcctcccagattccgacgggatttcacgtgtcccgccgtactcaggatactgctaggtacaaagactattttaaatacgaggctattactctctttggctgatcttcccaaatcattcttctataatctttgagtccacattgcagtcctacaaccccgaagagtaaactctycggtttgccctyctgccgtttcgctcgccgctactaaggcaatcgcttttgctttctcttcctgcagctacttagatgtttcagttcactgcgtcttcctcctcacatccttaacagatgygggtaacaggtagtacctgttgggttcccccattcggaaatccctggatcatcgcttacttacagctacccaaggcatatcgtcgtttgtcacgtccttcttcggctcctagtgccaaggcatccaccgtgcgcccttattaacttaaccttattttttgacctttcagtcataaactcttattaatactacagcgttttcggtttattttcttgttactatttgatatagatattcaattttcaatgtgcattacttggtgatctctcaccaatggagcctagcgggatcgaaccgctgacctcctgcgtgcaaagcaggcgctctcccagctgagctaaggccccacaagacctctcaagactaaacaagaccaatgcgcagttccttatccttagaaaggaggtgatccagccgcaccttccgatacggctaccttgttacgacttcaccccaatcatctatcccaccttaggcggctggctcctaaaaggttacctcaccgacttcgggtgttacaaactctcgtggtgtgacgggcggtgtgtacaaggcccgggaacgtattcaccgcggcgtgctgatccgcgattactagcgattccgacttcatgtaggcgagttgcagcctacaatccgaactgagactggctttaagagattagcttgccgtcaccggcttgcgactcgttgtaccagccattgtagcacgtgtgtagcccaggtcataaggggcatgatgatttgacgtcatccccaccttcctccggtttattaccggcagtctcgctagagtgcccaactaaatgatggcaactaacaataggggttgcgctcgttgcgggacttaacccaacatctcacgacacgagctgacgacaaccatgcaccacctgtcacctctgtcccgaaggaaaactctatctctagagcggtcagagggatgtcaagacctggtaaggttcttcgcgttgcttcgaattaaaccacatgctccaccgcttgtgcgggcccccgtcaattcctttgagtttcaaccttgcggtcgtactccccaggcggagtgcttaatgcgttagctgcggcactaaaccccggaaagggtctaacacctagcactcatcgtttacggcgtggactaccagggtatctaatcctgtttgctccccacgctttcgagcctcagcgtcagttacaagccagagagccgctttcgccaccggtgttcctccatatatctacgcatttcaccgctacacatggaattccactctcccctcttgcactcaagttaaacagtttccaaagcgtactatggttaagccacagcctttaacttcagacttatctaaccgcctgcgctcgctttacgcccaataaatccggacaacgctcgggacctacgtattaccgcggctgctggcacgtagttagccgtccctttctggtaagataccgtcacagtgtgaactttccactctcacactcgttcttctcttacaacagagctttacgatccgaaaaccttcttcactcacgcggcgttgctcggtcagacttccgtccattgccgaagattccctactgctgcctcccgtaggagtctgggccgtgtctcagtcccagtgtggccgatcaccctctcaggtcggctatgtatcgtcgccttggtgagccgttaccccaccaactagctaatacaacgcaggtccatctggtagtgatgcaattgcaccttttaagcaaatgtcatgcaacatctactcttatgcggtattagctatcgtttccaatagttatcccccgctaccaggcaggttacctacgcgttactcacccgttcgcaactcatccggagaagcaagctcctccttcagcgttctacttgcatgtattaggcacgccgccagcgttcgtcctgagccaggatcaaactctcattaaaagtttgagttctcactcatttctgtcactgacagatttattgttttttcattgttcagtactataaccttagttatagtgccctgcacattggttcgtcttgttcagttttcaaaggtctttgtcacttgcttctctcaagtgacaactatattagtatatcacagtcgctttcgcttgtcaacacttttttgaaacttttttaatcttttttcatcaagtgcctcaaccgcaacataccatagtccgtacgggattcgaacccgtgttaccgccgtgaaaaggcggtgtcttaaccccttgaccaacggacctgagctgttattttcaactcttactattatacagactttttctgacttgtcaacaacttttttaaactttttatgtttttttgtatgactccctaatgagtacggatatcaaactccttaaacacaatacgtaagtctctcaatactctttgacgccctcggaagcgttcatgtcttaagacgcgttctaactcttcttgtttgtctttactttgtttgtttctataatctcttagtgtctcatgaaagagataatactcatctagccacatacctccctcactgatacgatgactaatctcacctacttcttcatagggttctttatcatatctacgcttctggctttcttgtttacggatatggtctaaaattcgattacggaatttagttttgaagtatttacgtaaacgaggaatatcttctactagctcttcttctctactgatcaattcatgtaagcaaatcattccctcttggtcccaatctgatagctcccataaatgaaggtaatattcatttctacacttgtatacaattccttggacttcttcatataattctttaaacataacgtccccctttctagatacagtttaacaaataatgaagccaattcggttcttttctccattctgttccctacaccgtctaaactgcataaaaaagagaggtcttgcctctctcagggttataattctgcaatttggtttaggtttacttctgcaactgtgtcattaccaaacatagagataatcatcttcactttattattatcaatctctgtaatcttaccagtatagtctgcaaaagcaccatcaatgatacgtacagtttgaccaacttcaacatcgatatcaaactcttgtacagtttgtcccatagaaaccaagatatcacggatttcttgttccaataatggagttggttttgatctatttccgtgagatccgacgaatcctgtaacgtttggtgtgtttcgaacaacaaaccaagcttcatctgtcatcaccatttccacaagaacataacctggaaagcgattctcttctacttcttttctctttccatttttttcaacttgcactgtttgtgttggaatttcaacacgtaaaatattatccaacatattgtaggtttgtgcacgttgtaatagattttcttttaccttattttcataaccagaataagtttgtaagacaaaccaccctttatcaaaactatccatgatacttcctttcataacagaagatttttagcgtgaataactccacagatcttctaaaaaatgttaataaatcgaatcaaacctgaaacaatcaacttgtcaaaaatataaataatcacaacaaagaaagcagtgtattccatgatagaacgaaaatctctccagctttccttgcgagttggccatgttgtgtctttaagaagtctaaaaatatctccaataaaacgcatcgctctctcctatctcgtttctctgtgtgtagtgtacttaccacaatgtttacaaaatttatttacttctagtcgtgttggcttggggtttccgctgatcttgattgaatagtttctcgaaccacaaactgcacaagctaggcttgctttttttagtgccataacgcctccatcttatctattataacaagaaagctaggctttgacaagcatcttagcgaaatagattgactaccgaatcccatattgtttgagccttttccttaatcttcgcatccgagatagcacgactagcctcatctaccagattttgtgcacgacttctaatatcagaaaggctattatccgcctgattttcttcattacgctgtacttgatttcttgtattggctggtgcaattccattttgcttataagcattttcaaccgtaaaggtacttcctggcgtataaggtaaaatggtattagcaatgtttctaaagacatgagctgcaccgtttgaagtagatcctgctagatagtgattttcatcagtggtagggaaaccaagccagtgactaatcactacatccggagtataaccaattacccactggtcacttgtgtattccggattgaaaacagcttcagttgttccagtttttcctgccatgacatagtctgcaggcgatgaactaatacctgttccgtttgtaaatgttcccaacatcatactggtcatcttgtcagctacagacttatcaatcacccgtttttgtgaatttttatggctcgcaatgacctgaccactagcattttcaattctactaataaaatgagcttccggcattaatccttcatttgcaaaggcagcatatgcttgagccatttgaagagggttggtttcaacaccgcttcccaaggcgacaccaagaacacgatcgactttttccatgttgagtccgaatttttcgcccgcctcaaaagccttatcaacgcccaaatcattaacagtggcaacagcaggcagattaagcgattctgccaaggcttgatacataggaacttctcgactcgttttgatccctgcatagttatcaaccttatagctgtcatactgcatggtatggttatccaactgcttattcaaagcccagccagcttcaactgcaggcgtataaacaactaaaggcttaattgtagaaccagggctacgttttgattgagttgcatagttgaaattccggaatccagttttatcattgccagcaacctgaccgacaactccacgaactccacctgttttcggttcgagagctacacttcctgattgagcaaatgttccatcctctgccctaggaaatagagctgtattttcatagacaacctgcatatttgcttggtagttttggtccagctctgtgtaaatgcggtagccattatttacgatttcttcctctgttagattatacttggaaacagcttcattaacaaccgcatcaaagtaagaaggatagcggtaatctgagatttttccttcatacttatcgtgcaattgcgaagtcatatcaacttctgctgcttcggtttcttggtttttatcaatgtaacccgctgcaagcatattctgcaaaacagtatcgcgacgattggtagaatcttctacagaattcaaaggattatacagttccggcccctttagcattcctgccagagtcgcagcttgatccagactcacttctgatgcagaaactccaaagtatttcttactcgcatcttctacaccccacacaccatttccaaaataagcgttgttaaggtacatggttagaatttgatccttactatatttttttgttaattctaaggcaaggaaaaattctttcgcttttctctcaacagtttgatcctgtgacaaataagcgtttttagctagctgttgggtaatagtagatccaccacctgaacggccagctgttacaatagccaagaagaaacgaccatagttaatcccgtcatttttatagaaagaacggtcttctgtcgcaataacggcattctgcaaatttttactgatatcagtcagttcaacataggttcctttttgaccagacaaggcaccagcctccttttcttcacggtcaaaaataagagttcgagttttcaaggcattttgcaaatcattgacattggttgacttggctacagcaaacaaataggttccaactagcaagcctgcactcaaacctagtataaggacaatctttgttagatgatagcgacgccagaattttcgaattggacccacttgggctaatttttttctatcactgcgagaacgacgcaagctagtagacccagaatcctctgattcacttgtttcttttttaaaaagagaaagaaatttctcgaataatttatctaatttcatgcgtttattttatcatcttcatcataggaagacaagaatttagctatttcctatcaaaatagggctttttttgttacaatatctgtatgcaattcacatttacattaccagactctctacctcaaatgacggtaaagcaattacttgaggaacaactcctcattcctagaaaaatccggcattttttgagaatcaagaaacatattttaattaatcagcgagaagttcgctggaacgagatggtaaatcctggagatatttgccagttaacgtttgacaaggaagattatcccgaaaaagaaatcccttggggcaatcctaacctcgttcaagaggtttatcaagatcaacacttgattattgtcaacaaaccagaggggatgaaaacgcatggtaatcagccaaacgaaatcgcccttcttaaccatgtcagtgcctatgttggccaaacctgctatgtcgttcatcgtctggacatggaaaccagtggtttggttctctttgccaaaaatccttttatcctgcctattctcaatcgcttactggagaaaaaagagatttctagggaatattgggcacaggtcgacggacatatcaacagcaaagaacttgttttcaaagacaaaattggacgtgatcgccatgatcgcagaaagcgaatagttgatacaaaaaatggacaatatgctgaaacacatgtaagcagattaaagcaattcccaaacaaaacttccttggttcgttgcaaactaaagacagggcgaacccatcaaattcgtgtgcacctttcgcatcataacttccctattttaggcgaccctctctataatagtaaatcaaaaacaagtcggcttatgctccacgcctttcgactgtcctttacccatccgcttactctagagaaattaagcttcactaccctatcagatacttttgaaaaagagttaaaaaagaatggatgatagcgtcatccatttttaaatatttaaaaagcaagaccagaggccttgctttttatcgactcatgaattatttagcgatttttgcgaagtattcaagagtacgaacaagttgtgcagtgtatgacatttcgttgtcgtaccatgatacaactttaaccaattgtttaccgtcaacgtcaagaactttagtttgagttgcgtcaaacaatgaaccgtaagacatacctaggatatctgaagatacgattggatcttcagtgtatccgtatgattcgtttgaagctgctttcatagctgcgttcacttcgtcaacagtaacgttcttttcaagaactgctaccaactcagttacagagcctgctggaacaggaacacgttgagcagctccgtccaatttaccgttcaattctgggattacaagaccgatagcttttgcagcaccagttgagttaggaacgatgtttacagcaccagcgcgagcacggcgaaggtcaccaccacggtgtggtccgtcaagaatcatttggtcaccagtgtaagcgtggatagtagtcatcaatccttcaacaacaccaaagttgtcttgaagagctttagccattggagccaagcagtttgtagtacatgaagcacctgagataactgtttcagtaccgtcaagaacgtcgtggttagtgttgaatacaactgttttaacgtcgtttccaccaggagcagtgataacaacttttttagctccaccagcgtgcaagtgtttttcagcagctgctttcttagcaaagaaaccagtagcttcaagaacgatttctacaccgtcgttagcccagtcgatttgttctggatcacgttcagcagaaactttgatgaatttaccgttaacttcaaatccaccttctttaacttcaacagtaccgtcgaaacgaccttgagttgtgtcgtatttcaacaagtgtgcaagcataactggatctgtaaggtcgttgatacgagtaacttcaacaccttctacgttttggatacgacggaaagcaagacgaccgatacgtccgaaaccgttaataccaactttaactaccattagtgatttcctccttatgaaaatcatgaaatttttattgtgaaaagagtaacttgaatcactacaaatcacctttcaacaaacctattatataactatttgagttgaattgcaagtacgggcgttgttttttgtctataccccacttatttttctttctccttcaaaagcctatactgctgtctttctttgtctacctagtcatttcccactttccttttcaaatgaaaagtaaaaaatagaaaagctaaaaattattttcaacactccaattccacaagaaaagagacagggaattcctgcctctaggctgataacaattatttacggcgtcctggtctttctttgtaaccatagtaagaatcttcgatgatttcttgcatatggtcaaccattggaagacgtgggtttgcaggtgaacattggtcttcataagcaaggaaggccaattcacgtgaatgttctttccattctttttcgtcaacaccttgtgctttgaagttcatttggatacctacgcgctcaccgagttcgtaaacagcttttgcaaaagattcaaccccttcttctggtgtagaagctggaagtccaagcatacgagcgatatcttgatatttctcgtctgcacggtagtagttgtacttaggccatgtagctgtcttagctgggcgagtaccgttgtaacggataacgtatggaagcaagattgcatttgtacgaccgtggattgtgtggaattgcgcaccaatcttatgggccattgagtgagaaatacctaggaaggcattggcaaaggccataccagcgattgttgaagcgttatgcattttctcacgtgagtggaagtctgcattcttaactgagctttcaaggttttcgaatacaagtttgatggcttgaagtgcaagaccgtcagtgtagtcgctagccatttgtgatacgtaagcttcagtcgcatgggtcaatacgtccataccagtgtccgcagcaacaaatccaggaactgtcaataccaaagcagggtctacgattgccacggttggtgtcaatgagtagtcagcgattggatatttacggttatttgctttatcagagataacggcaaatggtgttacttcagatcctgtaccagatgttgttgggattgcgatgaatttagtcttcttaccaagcaatgggaatttgaaggcacgtttacggatatccatgaatttttgaacaaggtcacggaagtccacttctggttgttcatagaagagccacattactttagcagcatccattggagatccaccaccaagagcgatgattgtatctggtttgaaggcacgcatgatttcagtaccacgttcaactgtagtgatatctggatctggttctacatcagcaaagatttggtaaacaaccttattgcgacgaagatcaagttgttcgatgatacgatcaaggaaaccaagctctaccatggcatggtcagtaacgatcatgacacgttcaacgtcacgacatttttgaaggtattgaattgaatcacgttcaaagtatgtttttgaaggaagtttcatccattgcatgttatttctccgtcttccgacttttttgatattcaaaaggttaatggcactaacgttatccccaactgagttacgtccgtaagaaccacatccgagtgtcaatgatggcaagaaggcattgtaaacgtccccgataccaccgaaagtagaaggtgagttacagataacacgaatagctttaacagctttaccaaattctttagtcaattcttcgtcagctgtgtggatagctgctgagtgaccaagaccgttaaattcaaccatttgacgagctttggaaataccatcttcacggctttcagatttcaaaactgcgataactggtgacaatttttcacgagtcaatggctcgttttcaccaacttctttacattctgcagcaagaatgtttgttccttctggaactgtaaatcctgcttgctctgcaatccaagttgctggtttaccaacgatgtcagcgttcaatttcgcaccagcacagtttttgctgtttgctttcacgccgaagcagaattcttcaagaagtgctttttcttttttgtttacaaagtaagtatgatatgatttaaactctgctacaaattcatcgtaaatttctttatcaatgataaccgcttgttcagatgcacagaccatcccattatcaaatgatttagacataacgatatcgtgtgcagcttgacgaatgtttgctgacttttcaacataagctggaacgtttccggcacctactccaagagctggtttaccacatgagtatgcagctttaaccatggcattaccacctgttgcaaggattgtcgcaacaccttcgtggttcataagggcactagttgcttccatagatggctcagtgatccactgtacgcagttttcaggagctcctgctttaatcgcagcatcacgaacgatttgagctgcgtgagctgatgattcttgagctgatgggtggaaggcaaagacgattggattacgtgtcttcaatgaaatcaatgccttaaagattgctgttgatgttgggtttgttgttggagtgataccacaaacaacgccaaccggttcagcgatgagagtcaatcctgttacatcgtcttcttcgataacgccaactgtcttagtgtgacgcatgttgtttactacatgttcacaagcaaacaagttcttagttgctttatcttcaaatacaccacgtcctgtttcttcataggcatgtaaagccaattctccgtgggcatccaaagctgctactgacgctttagctacgatgtagtcagcttgctcttggtccaacttacgcatttcttcaagggcaactagagctttttgcaccaacccatcgacatgcttttcagcagcgagtttcttttcttctggtgtcacagtttttttatcagccttattttcctccatagctttcaaggattgatatcctttgttaattttttcacaagtttattataacgcattatttcaactttgtaaacagtttcataaacatttcacaaagaattttttattgtttgtgaattttttatcattttctttacttatcaagtttttccgttagagtttgtgaaatcaatttcaaatattttttatttcacaagcttgattggaagaggagcttggaaagagatagattttctagtaagcgcttacttttagatgctaacaatacctcctttgataaggaggctttatttttgttgaaaaacgccttgtttaaaagtcccttcataaacaacttcttgttctgttgttagtttcccttttccttcagcctgaccatttacaaaatcaccttcgtaggtccagccttctttagattgaaaggtaccttttccgttgaaggctccattgttgaaaccaccagtatactggtctccattttggaaggtaatggtaccttgtccattcattttaccacgtacaagactgccatcgtaaacaatggttccattatcaagctttagaacaccttttccgggaatatttagaaaaaagacgagcacagcacaaaaaacaatcgtaactactgccaaaagctctaaacgttgacgagtcagatagacacgatacttttcgtaaaaattcttaagattttccatcttcactctccttctctaaacgttctaaccatgcttgacaaccctcttgaacacgctgataggtttcctcaaaatctcctgtataccaaggatctggaacactttcagatgcaaatgagtaaatcttatcttgacagtctactggacacatctgacgtaagtcagaaacatttgaagcatccattccgataatataatcaaaggcttcaaaatcttccttactaatctgaagcgatgttttggttttgtcgtaaggaatctcatactgttgaaaaatcccttgagttcccttatgaatcgaattgccatgttcccaagaagaagtcgctcgactttggatttcataattatctgtcattgatttcataacaaactcggccataggactgcggcaaatatttcctagacagacaaagactaattttttcatcccatttcctttcttttatagaaaaacgggagttagtaatcccgtcttatttttcaattgcgccttctagtgaagctgtttctttcagcggtaatacagtcttgatagcagctagttcaaaagtcaagtaaactccatctacatcaagaacaatcgttctcttctcagtatctacttcatcgactgttccgtaaagtccaccgattgtaatcacttcatagcctttttgtagtttatttaagctttccatacgtttttgtgcttgtttcttttgagagcgttgcataaagaacatcaagcccaacatcgctacaagcataattaaaaatgtataatttggattcattgtattctcctttgtcttttacataggactactatatcaaatttcagctacttttacaagattgtacctgcttttctagtaagaaaaaccagagcttacgctctgattcttaggattatttcaagtcttgaacgacttttacaagattttctacagtaaagccatattctgccaatacttttggtgctggggcagaggctccgaaggtatcaatacctagaacggcaccatcaagaccaacatatttgtaccagttttgagttgcacccatttcgactgcaacacgacggcgaacttcatttggaagaatttcttccttgtaagccacatcttgtttatcaaagacatctgtagatggcatgctgactacgcggacttttgcaccttgactagccaattctttggcagctgagacagcaagattaacctctgaacctgtcgcaatcaagatggtatcaaagtctgatgcattttcatagacaacataggcaccttttgcaaccttgtcgaagtctgttccttcttcaacagtcaagttttgacgtgtcaagacaagggcagttggtgttttttcacttgtcactgcaaggtaccaagccgcttgcgtttcacgcgcatctgctggacggaaaacattcagatttggcatggcacgaagacctgctaaatgctcaactggttcgtgcgttggaccgtcttccccaaccgcgattgaatcgtgggtaaagacataagtcacaggaagaccttgcaaagctgacaagcgaacagctgccttcacatagtcagagaagacgaagaaagtaccaccgtatacacgaagtccaccgtgaagggccatcccgttcaagatagttcccattgcaaattcacgaacaccaaactgaatgttacggttcaagcgattggcatcgtcttgaagtccatcagtcttgatataagtcatgtttgagtgagcaaggtcagctgatccacctaagaaggtcggcaacttagccgctacaacgttcaaggcatcctgacttgagttacgagttgcttgtgagaagccattttctaaagctgggaagtctgctggagtcacttcaactggatcacgtccatcgataatagcttctacttctgcagccagttctgggtgagcttctttataatcagcaactagttttgtccaagcttgataagctgatgcaccacggtctgcaacatgttctttgaaatcagcataaacttgttctggaatttcaaatggttcgtagtcccaaccaagagcttgacgagttgctgcagtctcatctgctccaagaggggcaccgtgtacagcattagttccttgtttgtttggagaaccatatccaatgacagtcttcacttcaatcaaagatggtttacctgaagctttagctgcttcgatagcagcatggatagcttccaagtctgttccatcttcaaccaaggctgtatgccaaccgtaagcattgtaacgatcacgaacactttctgtaaaggaatcctttgtctcaccatccaagttgatgtcatttgaatcataaaggacaaccaacttatctagtttttgcaaacctgcgtatgaagccgcctcacttgagacaccttccatcaagtctccgtctccacagataacgtaagtatagtggtcaaagatattgtagccttcgcggttatatttggctgccaagaaacgttctgcctgggcaaaaccagtagcagttgaaattccttgacctaaaggacctgtggtagcatcaatccctgctgtatggccaaattctgggtgaccaggtgtttttgaaccccattgacggaagctcttgatctcatccatgctgacatcttcaaaaccagaaagatgaagaagggcataaaggagcattgaaccatggcctgctgaaagaataaagcggtcacggttaatccagtttggttgagctggattgatacgaagttgttttgtaaagaggctgtatgccatcggagccgctcccataaccacacctgggtgacctgagttggctttattaatggcgtcaatacctaggaaacgaattgcattaacagatagatttgacatagaatttcctttctatttgaggtgattattggatcacacattctattttactattatatgaaaaaatacatagaatagcaattaaacaattcgacgtaaataagtattctatttgctatcctctagtcgcctgatagtagggaagtaagcgtttataagcatcttctaatttttctaaaatcacttctaatgattgattttctatgatagaaacatctgctttaactaacacttttcggatttcttgaccgcctaccttctcgactaagacctgacgattttcttcgctcgcctcccaccgttgactttggccatcagagtaggctaaataataaatcccttctaccgctggaatttctaggaccttggcctgctttcctaaagtttgctcatctttcttgcgctcgatgaaactgacttctagtgagactccaaaatcagaaggacttccatacaaacgaagagccaacataggttctgtcactttcccctcacgctgtatataagcccagaagtgtggtcgcaagcgctgcgcttggttcatccactggctagtctgttggagttgccattctggatggcttgcttgaaaggctttggctaactctgtaaaagcctttctggcctcttgacctttgtggcgaaatgccatcattttctctcgttcttctcccgctttatcaggattacggtactgtaaacctgcaaagtctagatagtctcttatcttattcaacattaatttaatctcctccagctagcaaaaaatcaggataaccctgattttacttattctgtatctacgacaacataacgatttggctcatcaccttcagagtaactggtcacgccatccatacgtgaaataatacgatgaataatcttgcgttcactatttgacataggatctgtttgatgactacggccttcttctaaaacacgagtcgccaatttttgagcataggtctgcaagacttctgcacgatgttcaacataatcattgacattaatagtaatgtagaaggttcttgcatagcggttgtaaagataattttgagccaatagttgtaaggccttcaaaactttaccatggtaaccgataatacgacctggctcattggtatcaatttgtaaattgatgctacgacggttataatcatttgaaatcgtcgcctcaacatccatatcatcaatgattgtttggacataagtcgttacttccgtagctacttgttcaatgtcaaagctcggttccacttttaagcccaaatcttctaattcttgactttcagtttgttcagctcgactctcaacaataggagtttctacttcttccccgaaaccagcttcttcaagctgtaattcatttaaaatctcaatatgcccagtttcttctaaaatggtgttagcatgtttttcatttttcaaaatttcagccttaacttcatcagaaaccccttggccttcttcttcaatctttttaattgcttctacaacatgccctaaatcaacagtcgcttgactgactgttttgactggttcattttgttcgttaatttctttaggaacaccctttacagcctgctgattagctttaatgaccgttgtttcactaatagcttcaatatcaacttgagctggttttttaccaaataaaccaagaaagccatttttttcacgagaaatgactttgatatgagccttcagtcttgggatatctaattctttcaatcctttctggattgcttcttcaacagttgaacctgtaaatactaccattaccagattcctccttattatttcgttttctgagcctttttcttggcttttctttttctattttccaaatctttctgtgcctgaactaccgcctcgcgctctgcgataatcttgaatggattgttcaagaaataggtttgcaagacttgataagcattggacactgtccagtatagggcgactccacctggtgcataaactgcaaagataaagatcaagactggaatcccatacatcatcgcagtcgtagcgccattacgctcagacaaggccttgttggacaaccaagtacttaaaaaggtaaatacagctgctaaaatcggaagaacaagggttgtatccacaccaccaaggttaatccataagaaatgacctgtctttaaaaagtcaactcttgatagagcttggaacaaggccaagataaccggcatctgaatcaaaatcggccaaagagaatctgactgtctgacacccatttctttaaagactttacgcatttcttgctctagcttagttctgctttccatatctcgacctggatattgttctcgaagcgccttaatgcgtggttgagcttcctgcatttttctggatgccaccatttgcacttgaaagactggcaagagcactgtacgaatcaagattgtaaagagaataatccccactccgatactgatatcaaacgataaaaagcgaatgatttccgcaaagaagtaaacaaatttactccaaaaatcagtcgaatctgctgtaatatcactagttgtcccatttgtcgcacaggctgtcatgataaatagagatagacctagcaaactagtcaactgtagtttctttttcactcccatttccttcctggtaaatctttgataattttaatacgtggagtagatttttctccatctctgcgtattccaaggtttcgaccccttttcgagcaatgacaacaaagtcgacatcttctaccagactccctttcgcattctggataatatgtctaattcgtcgcttgatttgatttctagtgacggcattccccagctttttgctaactgatagacctactcgaaaatggtttttctgattttctaattggtagacaacaaatttgcgattggcaaaacttgtcccctccttgaaaatcgccttaaaatctttctctctttttacacgaaagtttttcttcaaaactcaactccatctattaaattactactattataccatatttttcaaaaaagccaatcatagcaaggttttggacaatttcatcagaaaaagaagctggaaaaatcacttttccaactccttgtacggaatattttttctgattttagttattttttcaaacgttcaacgtcacgggcaatgaccaattcttcatctgttggaataaccaagacacgaatcttcgcagcctctgttgagatgtctcctatcacaccaaagacgttcttttcatcatcaacatcacaaccaaaccaagaaattcctgagataacatccttacgtacaacagctgcattttctccgatacctgcagtaaagataatagcatctgccccatttaggactgcaaggtattggccgatatgtttttggatacgatcaacatacatttcataggctaaagtggcatcgtggtccccttcttccatagcagcaatcacatcgcgcatatcactagacttgcctgaaacacccataaggcctgattcacgattaaggacgtgactaatgtcttcaggcgtgttaaagtcctctgtatattgcattaaataaggaatgatggctgggtcaatatcccctgtacgagttcccatcatcacaccaccaagtggagtgaatcccattgaagtatcgacagactgaccacccttaacagctgtaatagatgctccattaccgatgtggcaagtaattaacttcaagtcttctaatggacgtcccaagagttttgcagcttctcctgctacaaactggtgacttgtaccatgagcaccgtatttacgaaccttgttttctgtgtaatattttgttggtagagggtagcgataagctttctctggcatacttgtgtggaatgaagtatcaaacacaactacactggtaatgtctggcaacaattccttgaaggcacgaacacctgctgcattggctggattgtgaagaggagccaacaagctcaactcttcaactttttctaaaacatccccttcaacaactgttgattctttgaaatattctccaccggcaacaacacggtggccaacacctgtaatctcatcgtatgccttgatgatgtcgaaacgaattaagtcatccaataagattttaacagcttgtgtgtgattttcgatatccaaaacttgttgttcggaacggccatcaaattttacagttgaaatcgaatctttcaaaccgatacgttcaatcaagcctttcgccaatactttttcttctggcattaagtataattgccattttaaacttgaacttcctgcattgattgcaattgtttttgtcataacaagactcctcttttaagcgttttcatctattataacaaaatctattttatatttcagtaccttgagtccatttttgaaaattttctttaaatttcattaaaacacttgcatcttgcaggctagcaagtggataaacaaagggttctactggtatttcacttttcttttgtaagataaaaatcgtcttggattgtttagcattagcaaagagattttcagggagactgatcatggcaactagatttgcctcttctttcaaccaccctttcaataagtcactttgaggactggtcaacaaatcactcggagctagaaaaatagcatagccatctgatttgagatacttaagtccttgttccatgagcaagtgatgggcgtaggtatgttcttgactagaggctacttgatggcgcgctgcaacggcatcatcaggataatagccaacaggcaagtcgctgatgaccacatcgctttctttgagcatttgtggacgaacggcatctccttggacaaagccagcctgcaaaccaatcacatctgccatgctagctgccaaatcaatcagcaaatcatctacttccattcccaagtaatccacttttttagcaagcgaagtcaagaaagtagcgcccagaattcccatcccagaacccatttcgaggatagtaatttcctcctctttaaacagctcttccacaataaacaccaaaagtaaagcaatagcatctggcgtaaactggtgattggcctgtaaaggctccgtttgtcctgccttcatcaaaagaaactggtaggtcttgagccactcttccttgcgaagcgctaagcgcttaagggcttgattgttctccttgacctgctctagctcagtttcaccatccaaatagatgctgttttgctccaccaaggcgtcataaaaattggtcgccaaatcactttggatgacttggacattctctagtaaataggtatatgcttgttcaattttttcaaaatccatattcctatcttatcaaatttccctgcgtttttccatccttatagaaaaatcactccctgactaggcgagtgatttttgggctactgttaaaaagagttctgagtaatttccttgaaacaagtcttcagcgctataaagaatctgactatgcacagatgaaaaaccgttctcaattagctgtttttccagttcagtcaattcaaagccgtgatggttggtctccgtcttggtaaaatcagcaataaggagtcgtccatctttcctcaaatgttgatgaaacagcgagagagctgcatccaaatcagtcatatgatgaagaacccgacaaacaacaatgagatcaaactcttgcttcaagggacttttcaataaatcttgctccaaaaactggatattcttgatttcttgctgttccgctttcaaacgagcttgctccagcattttctcagaaatgtctacaagagtgactgacttagcctgcttggctaggggcaaggttaagagccccgtcccaccaccaaaatccagaatttctttgtctgatagaagatcaagctgtttctcaatagcttgataaaccaagtttgctaggaagatatttttaggtgaatcaaaagtttctgctttgtggttaaaatcatgtttcatatttttagtttagcacaaagtagcttgattggctagaaattctctttcttttcaaccttctcttctgattttttcttctctgcttgattacttgaatcagtcactaccttttcctttttatccgttttctcttctttgattttgacggaaggaaagatgaattcatattggctcttaggcgtacgaaccgtcgtcaccaagcttgttttcttgttttgatagcttacctgacctaggttaaaggcctgttccccactttcttgctcaaccttatctttggttcgtttagccatagcaaaagcaaccaatttctctttattcaaagtatagtcttgatagtgggcgacttgtcggttcaagtaaaattgcaacaaaagactaaagatggctgccatggtgactgcatagaggagaactcctgccttaactttttgctttttccacacgatagatgaactccctttctaagcctttttgaaactggaaacgaaaacgaaccacttgattttcctctgtaatctgtgcggatttgagaccataaaccataggctgatagcctcgtccactggcatcggtttttcgaaaatcgtccgatttagacttacctatcgcaatttccttgccatcctgcttcatataaatgcgatcgccttctactttttcgaactgcgaacggtctaattctgcctccagctggtccacaaacaagagccactctttttgctcgctttgttgctggtagcgaacttctgaaatgaggagctgactcatggcctgaaagaggagtaaacttccactgatgacaatgagggcaatcagggattctaacagggtaaaagccttgattttatggctctttgatagccaacaactgttctgaaccatggtagacctccaatcccttttcactagaaaacacctgaatctcaactccgttgatgtttacctgattttgacctgtctgcaaggccatcttagctacacgcaagatctcttctttctgcaagatttttgcttcttcctgcctatttttctgaatttgtcccaaaagaagggtcgcaatgctggcaaagatagctaaagcgactactgcttccagtaaaatcactgccctaatcttttgtttccttaatgcgtttaatttttccatttcctagatataattgataacgaatcgctcctttactggtctgaaattcaaccttagctagggacgaattgcccccagctcggtcaaatgtaatactttggcctgatggtgcctgaattcctttaggaactgtcaacttttgactgccattactgattgtcttcccatctaagtttagactagtcttttgctgactggctacactgcgcttttgggtttcccgataaagttcctcaaactccataaagaaaatctgctcctctaccgccgcaaaagtggactggacagagccagacaagcccaaggcaaggatactcacaagtcccaaaaccaagagactttcaagcatggtaaaggccttaatctgcaacggtttgactggtattttgtttagcatggtattctttataagctttagcctgttcttctgtgattcgcccatctgcttgtaacttgcttagactagcatcttcatttttatccaagctataaagctctgcctgactttccaccaccttaacaacagcagcttttcctttgtcattgaccgcttctttttgcttggtcagattaggtacaaagagcaagagaagcacgctgatgatgagcaagaccaccaacatttccacaagcgtgaaagctttcactttcgcttttttcaagaatgtcatcatttttttcattttaaaaatttacctccatattttgatacatgggcatgagcattgccgcataaagtaaaacgataatcagagccacaaagataaagaccagtggctgcaccagattcatggtgcggttgactcgggtaaaaaaggcttcccaagttttttcagcatagatttccaactcactccccaacttggacttgacttccccatactcgatgatgagactcaactcctttttaaagaaaggataggttcctatggtttgagaaaattcctgaccattttgtagggcatgagccatatcttgaccaatttctttaaatagctgggaaccttgttcctgcatgatttgaaaaatctgcgtcaactccatcccttgagaaatcatattgccccattcacgcgcataataggctgtcagataggtctgcacaaaaattccaagaaaaggaatgcgtgccaggatagaaaagacccgcatcttcgaacctcttttataaaaagtgagtgctaaaaggacacctactgaaacaaagcctaccattcctagaaaaatttgtggcagattgccaataatttgggtggcaatattgctactatccagttgtggtagtaggtagttacgcaaccccagcataattaagagaagaaaccccagcaaaatcaagggataggtcgctacttcaattagttttttcttgaccttggccaaattatccagatattcttctatctttcccaaactcaggtgtagattcccatgaacctctgctagggataactgagtgacaatggcacttgaaaagcccaaactttccatcatttctgagaatgatttcccttgagataagcccgcacgcatctgggttacgcactgcttgtccaacaaggcactcctatctagaaaggagatagtctctaccagatgaaaaccgctggaaaagagattattaaacaaggtgatgatatttttttgcttagctgtagctaattttttccgtttcagcctgaagacttgtgatatgtccatctttaagaagctggtcaatctgcgcattccagctagttgactggtgttcttgatagtctttgtttgcaaagtcaacgattcctcctcccccgattaatctctggtagcagactccttgcagaacgactgccaattcctcctcactcacgcccaactccagtaaacgttcataaactcctcggatactcttggcatgaatggttgaaaagactgtcgcacctgtcaaactggctctgaccactgcacgcgctgtctcgctgtcccgaatttctccgataatcaagagatcaggacgatgacgcaaggaaagtttgattagattttcataggtcaacccgattgcttcgttcaactgcaactggagcatgttgtcctgcttgatttctacaggatcttcgatggacataacttgctgtcctttaaagagagatttagccaattcatgcatcaaggttgtcttgccacttccgactggaccagcaaaaagataaagtccccgttgcctgtactgcttgcccagttcttcaatatcctgaaaccaaaaatgcaaatcctgctcctcatcatgcaacaagcgaataactaaactctcatgccctcgatagtcgcctacagtagataaccgtaaggacgccatcttctggtcatattcatagtcacaggaaccaagctgactacgtcgcttttctccaacattcatacccgccacaaacttaaagtgactgatgacggccgcaaatttttcaaaatcataacaaccgattttacagcgctcgtctcctaccctcatatgaagctcataagcgtctaacttaggaacaaaataaatatcctgcgccccttttttccgagccgaacgaatgatttcttgtgcaatttcttgaaccatacttacctcctcacctatactattcgcaaagatttggaaaaataaaaaaagcaactccaaaaagttactttttctctattttaatttcatacggcaagaacggtgcctttccttacctgtttgtttttcatagcctgggcgtagtttttcatctggaataacctgctcatcctgcaaaagagccaaagaatggtattgttgtaaatactcgtcacattcatcacaccagcgttggtcttctggatcccaaaaaatggtcatcaagtcacttctacttttataaagaggggattcttgttccaatctaaaccagcaagttttgtagtatttgagagcatcataatactggtcaaatttcttacttgctacaatatcttcttcccaaccttctaagaaccaccacggttcaaaatctccgtacatttctataacacgatacatattcattcattcctttgtaccgtatattataaccaattccgctaaacaaggaaagaaatatgctcatttcttaattttttgataaaaaatccagccatcttatgatgactgaatttctatttgcttgtgttccaaaatctttttgctacttaatcttctgaaatatcgttttcgatgatgaccttaattgcatggtggtctgctgctttactgaaaacttcataggctttttcaatttcacttagtttgaaataatgagttaccaatttttctggttcaatcttatgactttcaagagctttcaacaattgtggagtggtatttgtagataccaaaccagttgttacattgatgttgcgaatccaaagtttgtccaaatcgaattcgactggtttaccatgtacaccacagttggcaactgttccgtctataccgataatcttttgacagaaatcaaatgttgcaggaataccaacagcttcgatagcaacatctacaccacgaccatctgtcaaatcataaatttctttaatagctttttcagggtctgaagaattaaccttgtgagtcgcaccaaatgatacagcagtttccaagcggttatcgtctaagtccaccataatcaatttagctggtgaatagaattgggctgtcaaaagagcagccaatccaactggacctgaaccaataattgctacgctgcaaccaggttctactttcccttttaagacaccaatttcatatccagtaggtagaatgtctgatagcataaccaaggcttcatctgacaagtcttctggagtatggtagagagtgttatctgcatgagggacacgtaaatattcagcctgcataccatcaatcaagtgaccgaaaatccagcccccttcgtcttcacagtgggcataaattccttttttacagtagtagcatttaccacaggcacagacacaagaaatcaagaccttgtcgccttttttgaagttcgaaactccttctccaacttcttcaacaatcccaatcccttcgtgaccaagaatggtaccactttgacaagcgggaacatcccctttgataatatggaggtctgttccacaaatagtagtttttacgatacgcacaatagcgtctgttggcttgcgaatcactggtttgtcaacatcaacaaaagaagcaagtcccggtttaacataagtataggctttcataaagcattcctccgtttttttatttgtactgtttataatataattgtaagccttttcatttgcttgttcaagtttttttgtgatttttttaatttttttatttactggtaaagaaatatagataaaaaagcagaagctaatccctaacttctgctttctctcttatgcttgataacgtttcacaccatctagataggttgctaccaattccaaatctttatctagtacgataaagtccgcgtcatagccttcacggatttgaccacagacatcatcaatgtgaacagatttagctgggttgaggctggccatcatgactgcttcatgcggattcgcaatgccccattcgaccacattcttcaaaccgtccttgagtttgaggatagaacctgccaaattacctgtagatttgaggcgagcagttccattgacaactactactgggaattctcccaacatatagtcaccgtcttccaatccacccgctgtcatacagtccgtgataagggcgatattttcagttcctttttgtttgagcaaaatatcacaggccttgggatccacatggtgaccatcacaaatcaattcagcataagtatgtggtaattcatacatggctcccaccataccgagttcacggtgagtcaagccacgcatgccattgtaggcatgtacccaaacgctcgctccagcatcgactgcttttttggcttcatcaaatgtcgcatttgaatgcccaagagcaactgtcacaccttctccagtgatcgtccgtacaaagtcttctacaccttcacgctctggcgcaagagcaattttattaagcaagccattagctgctttttgccaagcacgaaactcatccatacgaggatctttcatataggcagggttttgagctcccttgtatttctctgtgaaataaggcccttcaaagtaaataccacgaatttttgctccacttgcttcccgataacgagcaccgatattttcagttaccgcaagcaattgctcataagaggatgtcaaagtggtaggcaagaagctggtaacacctgtactaagtagtccttcactcatggtatgaagggttccttcgatattattatccataacatccacaccaccaaatccatgaatgtgggtatctacaagtcctggagcaatgctataacctgtatagtcaatcacctcagcgccttcaggaatctgttcgacatgttttccaaacttgccgtccacaagttccaggtaaccgccacgacgaactccgtgtgggtagaaaaattgatccgctttaatatagttaggcataatgttaacctccttaaaagattgattctacaatttattatgtcaattacattataaacctttcttttttatttgtaaatggtatagacctattttctagagatattttaaaagagctggatttctccaactcttctctttttaatacaagttattttgatttaactggcttgtcttgagctgtttgcaaggctgtagcaatggtatctgcatacaatttagctcctgcttcaatcttactattgtcacttccaaaatggacttggtctgttccagtccagatctctggatgctctttcgcaacttggttccaatctgctatcgtgatgtaaggagtcttctctgccaattctctcatataggcagcctctttctcaacgattgcataggtctcttttgtcttatctccctcataaggagtcaccaaaaccatatggtggcccttaggaagattttttacgatactatcccagtcttccttgtaattttcaggattatttaccccagttgcaataaccaccatctttggtagaaatttattctggctattgttgagcatgatttcgttggcggtcttggttgttctgctgacttgtgcattaatctgtgctccaggaagggctgtctgcaaggctgtattagctcttagtgctaccgaatcaccaattaacatagtgccatcagcaattcctaaactatcagcttctgctcgttctgtcatcaccttggtctggctaatatttgttgcagcttgcttcaagccattgacagttaagtctgtctcaaaagctcccacttgtggtgccagcaaagttactaagaagacaatgaaggccaagattccagtacttgctgcaaggattgtgtgaatatgaggcaggggacgaaaggcttgtataataggtgtgttctttcccgcaatccaaggttccagcacataaaatgacaggctggcaaatccataagaaaaaatcaaagtcagtaacacagcaagaagatttgatgtcaactgtgagaaaataatgtagaaaggccaatggaaaagataaaccgcatagctagtatctgctaaaaagctgataatctttggctcctgcatgttaggagtcttttcatgtaagacacgcgccgccagaatcatagcaagggctgcaaggctggcaagcaagaagcccataagataggcaaagagataggtaaatttgacaaagaaggtcaaaatgagtaagaatccaaaacctcccccaaaaaccaaaagggtcttgcgtaaatcccagattttatccaactgcttgacgagggaagtcgtctgacgaacgcctacaatcgttgctaggatacttcccaaaaagaatggatagacatgagttaaactggagaagtaaacagaggaataagaggtcactagaaaactaccaataaacatggagaagaagctgattaaaaaggcagcagctgataagagaaaaaccatccccttcaattgaccatttgatttagcctgtttggataagaaccaaactgccaatccccagaggatatagtagtgaacctcaacggccaagctccaattatgaacaaacaagtgaggaatgaactgtgattcataactcccacctgttagaagttcatagaagttagtcataaagcctaagacacccgcaatctgaccgccaattccagctacatagtcttgacgaaccaagaaagtaaagggcatggtcaccaagaccatcaaaaccacaggtggcacaatccgataaaagcgtcttctaaaaaatccaagcaaatcaatttcatgatttttagaaaattcttcgatgagtagagccgtgatcaagaaacctgaaaatgtgaaaaagacatctaccccgaaaaatcctcctggaaagatggtctgaaagaagtgatacaagagtaccaaaagtaaacctgtaatcctaatcaaggaaaaccatttaatgcgcatacgagtttattcttcctttcattgtacactttattctatcaaaaaaagaagaaaaatcctaagagaaaacttaggatttttagcttatatcaattccagtttaaaaattacgccctgatttattatagccatatttttcaacaaaatactcacggaactccaagagattgtcatccataatggcttgtcgcacttgcttcatcaggttaagcaagaagtaaagattgtgatagctagtcaagcgaataccaaaggtttcatcagccttgagcaggtgacgaaggtaggcgcgtgtatagttcttacatgtgtagcaatcacactcaggatccagtggtgtaaagtcctcagcaaactgggcatttttgacaaccaaacgtccctgactggtcatacaagtcccattacgagcgatacgagtcggcaagacacagtcaaacatatctacaccacgaatcaccccatcaatcaagctatctggcgctcccacacccatcaaatagcgaggtttattttcaggtagcagttgggttgtgaagtccaagacggcattcatctcttcgtgggtttctccaactgctaaaccaccaatagagtagcctgggaaatccatgctgacaaggtcgtgagccgattgacggcgaagatcttcaaatccagccccctgcacaatcccaaataacccttggtcatgcggacgacggtgagccttcaaaccacgctcagcccaacggctggtacgctcgattgatttcttaacgtagtcgtaaggttgataaaactgaggacattcgtcaaaggacatcatgatgtctgagcccaaattattctgaatagaaatggctttttctggggacaagaacatcttagaaccattgagatggtttttaaaggttactccttcttctgtgatattacggctatctgctaaggaataaacctgaaaaccaccactatctgtcaagataggctggtcccaattcatgaacttgtggagaccacctgcgcgtgcgatgagttcatctccaggacgaagccagagatgataggtgtttgacaggataattcccgaacccatctccttcaattcttcaggcgactgagttttgacagtggcttgtgtcccaactggcataaacataggtgttgggaaggtaccgtggggagtgatgatttctcccagacgagctcccgtgtgtttttctttcttaatcaaacgatatttgattggtgaatctgacattttttacctccgaagctgggaaaaacagtcccagttcatactttgtgcccaagggcatactgtatgattttatcaaaaaaagctggaactgtcacgaactatggtgtataatgagagaatgaaatacccaaaaattgatttaaaaaccattcgtctgcaagctagacaatttcaggctgaaaatccccgtctctttctcgtctatctcttacctagcatgctgatcattttgtctggcttcctcaatcccttagagcgcatcaacgagagtgttttagaacaaccctttttaagcgtgtttggccatgtattccaagcctacctttttcctctattagtctcctttatcggaacaatacttctgaccagttcagtctatacaacgctgaaactcatcaagaatccagatacagaactatccgtcaaaaatagtctcactctctttaacgaagagcacttttcacaaacctttttgactctacttctcaaacgtttctatctcttcttatggagcattcctagtttactcgggatttactttctcttttacagtagctttttagccaagaaattcgttgtccttcatcctgagtttcctaatctggatctctcgtcagttgaaactgaacgtttcctcatgacctttggtctctattttctagcaagtatcctcttgatgattgtcggaaatagtctctatattccacaatactatgcctattcgcaggtagaatttctcctctgtgacaccctagacttgggccaagctaaaccagggcaaatccttaaaaccagccgtttcctgatgaaaggctataagtttcagcgttttgtactagacttacaactccttccttggtacttcctcaattggattacctttggaattgctagtttttcactcctaccctacattaaaatcaataaaatgattttttaccgagcagtactggctcgaaaacgtccaaaagcttgaaggtggcccctcaagcttttttctatcaatgagtttctccacctaccaacttgagatcctgatctccatgttctataatagccccgattgccgcttctatccctcgcctaatatccactaaactcatagctggagtagtcggtcgattcaccacctgttccatcatataaggaatgtgcataaaacctgccttaacatgtggaaatttcttttctaccaaatagagagcctgatacatcaaatgattgcagacaaaagtccctgccgtatttgaaacagaggccggcaagccctctttttttatagcttggaccatcgctttaatcggcagactactaaagtaagccggagcaccatctggacgaatgggaaggtcaatcggctgattaccttcgttatcaggaatgcgtgcatcgtcttgatttatagccactcgctcaggtgtcaagctggttcttccacctgcttggccgatacaaaggacaaagtccggttgataacgactcatttcttcttccaatacttgggccgatttgtgaaagactgttggcacttctagccaacggacctcagcaccatggatttcagctggtaaacctttaatggcctccaaagctggattgaccttttcccctccaaagggctcaaaacctgtcactaatactttcatttctaactccttacaaccaattccatgaaactattttcttaaaaacaagtataacatatttcccttattctggagtgaaaaggactagagaggatcagaccggcattaaagtttatttaaagagaaaaatactaatcaaggccaaaatagctggtccaccttgcttcaaaataattttcttatctgctgtgagagagccataagccgcagcaccaatcacaaataaaacaaaaatagtcacaatttctaaattctgtgagaaataaatcccatacaagagaaagactcctacagagcattataaatcccttgatttttaaacaatgaacttactgacggacgagccagttcttccttgtccatgttaaagacacgactagtcgcatctgattgcgttgcaatactttccaaataaaaaatgtaaaaatgctccaaagcaacaatcgttgctaaaatgattgtaataattgacatctatttctccttaaatttctatattttcaatacccaaaaccaatttatttactaaacggctgagttctgttctttcagactctgttaagatactttccatctcttccttaaccttgatatgctgcagaggcggattcacaactaactgctctttggcatacttcgtagcctccaccaaaccttccttttccagaattttgaaatgtcgggtcaaagcagcctaatcaatcttcaaacgctcctgaaccgctatttgattacaaggggaatgcttcagcaaaaataataaaatctgataccgtgtcaaactaatcccaagttttttttaaaacaattgcgtactcgcttgctcagacaagcggagttgataaagcagatcttgaatctctatcatttcttcctcctttttattgattgatcaatagttgactaatcaggtataatgcaaagtaaaataaattgcaagaatgttgcttggattattacaagatggtaacttcccattcaaattgacaaagaaaaaacgaacgagactcgcttcctatcatgaaagctagatctcattcgtaaaaattatatgacagagtctggtttatccattcattgaaacgtgaacgtggtcatagtggttttctgtcacgctaccacggtctggcattgggttccaagtattagctggtccatatttgctatcgaatggagcatagaaacgttgtttccagatgatgtaactaattccacggctagccatgttttgaatagcgtattccgcaatcttatcccctagttctgagctttctggtaccataaagtcgatagccaaaccttttccgtgatctccactgtctcctggacggtaaccactaaaggatgtgatgccaaacaagttagcaatttcttctttaaaggccgctgtttgtggttgaaggcctgcattttcagatttcgctaccgcaagtccagcataatcgggcgctgctggagctgcgtaagttgctgaagttgttttcgtctcttctggttgataagtagaaactgctgctgtagcttcacttgatgatgctacttcttttgcttcttctgaacttgttgcagttgtttcaggtgctgtttcttctactggtattgtagttgcttccactgctgattcagcttgagtgcttgcttgtgtttcatctttctcagctggagtcgttgcctgaggagctgcttctgcaactgcactactcgtttcggctgtttgttcctctgggacagaagttcctgtagatggtgtcacttcttctgaagcagtcactgtctctgtaacttctgaacttgttgctacttcttttgttcttgtagtttctaccgcttttggagcttctgcaatcggttgagaaaggtctgcaacttgaacagtttgatcatctacggttacttgattggttgtcaaatctgctgtcgcagttgtcacttcttcactagaatctgcttgtggagtttggatttcaacttccgttacctcttctgcttcattgacagtcgttgtcaaaacagtttctgggaaaatcaagtccatattcgtgattttattcaaattcgcaagaactgtgacatctacacccaaggcttctgcaattgtgctcaaggtatcaccatactgaacggtataacttgttttgttatccgttttagtcaaatcgttttgaatttgctcaacactctgtgcagtccaaagaacttcttctgcttgagttgccaatactggggcaaatgacaaggctaccgttgaggctaataatattcttttcttcattctttcaaattcctttcaaatgagtacctgtctatgataacacaaaaaatgcagaaaaaaagccctctcgggcctatttaacagaactgtctattccttgtaacaaactcggttacttgaaatagtttgttaggtctctgtcacaaaactgacacaatctttttatcgctcagccttaaaaaaacgggaaatatctgctaacccttgaatcctatgatttccttcataagttgactctaaaaaattaatgctttgaatcttactattctgcgcgaattccacatccagaatccgatcccctatataataggtcttctcagaatccaactgatacttgtctaacagataggtggccgcttctgaactaggtttacgcgcaaagccactctgacttgttaaaatctctgtaaaataagattccaaacccaagtctcttagaatggtaagagcattgtctcccttatgagtgtaaacaaactgctgaattcctgattcctctgcccaagctagcacatcacgcgcacctggcatcaaaactacctgagcattcttctcagccagactctgggcacgcacctgatttagcacctcgacatccagttttcgctcttccgcaactttctccagcaaatcctgcacagaaaacttgagaataaactctctcaccttctccttatcataaggaatagaaaactgagcaaaagtttcctcaatccctgataaaatcgcttcataagagtccaataaagtcccgtctaaatcccaaataaaagctgttttttgcatttcctatcctttcaagctcatatagcgctggtaacggtaacgtagaaataaccaacgaaaaccattatccaaaagggttccggcccaaataccgggcaagccccaaccaagcacaatccccatcagatatcctgttccaatgcggatacaccacattcctatacttgtcgcataaaagggaagccgagcattgcccaaaccctgccagactgctgtatagatgactgttcctatcgtcataggagtaccaagtagtgaaaaaagtgtcactaaaacactagcctccaccgctaaagaatcagtcgtatagagatgagtgagtggtatacccaaagcatagatactgaaggtcaaggggaacatgaggaccagagaaagccaaaaggtttgcttgctcaaattagctactctttcccaattatcctctccaactgctcgggccaccagcatgaccgttgccgtagcgacgccaaaggcaggcatatagttaaactgggtcaagacttctccgactgcattcccagcaactgcctccgttccaaaagacacaaccaaggcaatgatcacgacatcaccagcccgcatcataagccgctctccagctgctggcaaagctaaggtcaatagtttcttatctaaaccaaaagtcggtttctcaaaaggcaactttaattgcgaccataaaatcacaagacctaccaaacgagacagaattgtcccccaagcaacaccagctatccccatatccagaataaaaatagctagacttgaaaaaagaatattcaaggcattggataaaagactcacatagagaggcaaacgtggattatgcgttgcacgaatcaaagcacccagactcgtcatgaaccccaaaagaacaatcgatccgcctaccaaggatagatagagtccgccactctcagctacatctctctccgttcccaagagtccaatcatctcttgcccagcgaagatagacaaagctcctaaaatgaaacttaatagtaaagtaatttttaacgcctcagtcacatgataggctagcttagactgatccttctgccccaaactttttgaaataacactagaaatagctgcccctagagcaatgaaaatcgcctgataaatcgtgataatattaccagctactgaaacacctgaaatagctatcaatcctaaatgagcaaccaaataactgtccaccattcccatgagcatctgcaaaaagttttcacccatagctggcaatgcaatattaagaatgtctttatttttcttaaacaatctctcctcctgatgaaaagaaactcagttggtttcccaaccgagtttactccctctgtcttaaagtcctagataagcctccaccgctgcttgcatatcagtagctgccacggttgtcttgtgacgaactggagatgtttcaaggccatcaactgctggtggtactgcaacacctgaaatttcatgtaattgagccaaggcttcaaagtctgttaaacctactttccctgttacagcctctactgcaaccactgggaacttataaggactagctgttgaagcaatcactgtcttagtcacatcgccagtagccgcttggtatttcttataaactgccgaggcaaccgccgtatgtggatcctcgatataagaatctgactcgtagacacgcttgatttctgctgccgtttcttcttcagtcgcatattcagccgcgaagagttccagaatctctgcatcaaagtctgtcaattcatattgtccttgtgtattcaaggcattcatgagttcagctgtcttaaccgcatcatttcccaaaagatggaaaatcaagcgctctaagtttgaagataccaagatatccatagatggactagttgttactttaaactcacgtttcttgtcgtaaacacgtgtcttgaagaagtctgtcaagacattgttgtcatttgaagcacaaattaatttgccaactggcaaaccaatttgcttagcataaaaggcagctaagatatttccaaagtttcctgttggtactgtgaagttaaccttttcaccagccacaatttcaccagtcttaaccaactgagcgtaggcataaacataataaacaatttgtggtaccaaacgaccaatgttcatagagttagctgatgaaaattgtaacttgttagcagccaatttttcacggagagccacatcattaaacatatgcttcacgttggtttgcgcatcgtcaaagttaccgtcaatggcgataacatgagtattgtcgccagcctgagtagtcatttgcagctcttgtaccttgctgacaccatcttttggataaaagacgataatttcagtacctggaacatctgcgaagcctgccatagcagctttcccagtatcaccagatgtcgctgtcaaaatgacaatcttgttctccaaaccatgcttcttagcagctgttgtcataaagtatggcaagatagacaaggccatatccttaaaggcaatcgttgaaccatgaaacagttccaagttgtattggccgtctaatttcaccaaaggcgctatagctggagtatcaaacttgctatcgtaggcattattgatacagtagtccaactcctcagccgtaaagtcatctaaaaaggctgacaaaactaacttagcaacttcctgataagaagcatctttcaatttgtcaaagtccaaatctacctttggataagtgactggtgtaaacaaaccaccatccgttgccaaaccttgcaaaattgcttggctagcagttactgtattgttggcatcacgtgttgattgataaactaatgtcattactctctatcctttatctatagtctcttccattatatcatgatttttcagaaaattctccttttataagagaaattataggcccaattcttctttcaaaggctgtaaatagcttgtttcttgcttatttctcatctccagtccttcgcaagctagcaggagtatgtgtttggaaaattcaataatcgcagtttcttcctcatttgtaagctttttcttagaaaattgtcgtcttaaaaacttgtaatttcgcccaaattctttaaagaaagtcgctgtttctaagtaagcttctaacttatctaaattaaccaacaatcctaagtgaaaagctgcagaagcgaaggttctctctagaggttgagtacacacactacgaaactcaactgtaccccgagtcgttaagtcttggtactgataactacgatgagtttcaaaatccttctcttgagggtaaataagaatctcatccccattaagagcatatgcttggatttcagttgtagccaaatagtcccttgcctgaatcggataaaaataataggtttgcccatcgcgttccgcagtaaaaattgcagaatgatctagataatcaaaaaaatcatcctcatctttaaagagcctagcattgacaccaacattctctggatatataccatgcatcgattcttcccagaaaatatcccttgaaattttcgtatcccaatcctcacctgaaaactcagaattggcaagtaaataagccttagccccttcaatttgggtaaaagcattaatcactcgtaagtagttagactttgaaacatccaactgaacctgactcccacagataaaagcaccatattcagggaaatgatgcaagtctgattcagccatatttctactcaaattcaaatagtccactaacatctgataacgtggataagcaactggagtattctcatttttattccagttgggatgaataccgcagccaacgatagcatgattggattcgcctaattttctctgaattacatccatataattattaaaacgattttcgacctcttgaattgtttcagccttaccaaatgcaaactcaatcgtagtataggaaacttcaaataaaataacatcctgacttgctggctccactaactgaataggagtcccaaaatcatcaaccttttcgacagtaaaatccaaagcagaaactaaatatcggaataagtacttgataacttcaacatctgtagcatccccttccaagtttacaacaggatattccagctcaatcccgacaaacaattcaggattttctttaatatttttcaaataccgatgttttaataaatcgatagaacgagacatacttccctacactttcataatctaaataaaatttgaataactattattataccaaaaataatataaaaaaggaacgaagatttacaacgttccttaactctatactataccggcggccggggtcgaaccggcacgtccttgcggacactggattttgagtccagcgcgtctgccaattccgccacgccggcaaatagtaactggggtagctggattcgaaccaacgcatgagggagtcaaagtcccttgccttaccgcttggctataccccaataatataaaataggcgagtgatggggatcgaacccacgcatgccagagccacaatctggtgtgttaaccacttcaccacacccgccataattctattaacacgggcagtaggaattgaacccacactgaaggttttggagaccttagttctacctttaaactatgcccgtaaaatggaaggggagggattcgaacccccgaacccgaaggagcggatttacagtccgccgcgtttagcctcttcgctacccttccaaaatatataaatggcgcgagacggaatcgaaccgccgacacatggagcttcaatccattgctctaccaactgagctaccgagccttattgcgggagcaggatttgaacctacgaccttcgggttatgagcccgacgagctaccgagctgctccatcccgcgttaatacaaaaggaggatgtgggattcgaacccacgcacgcttttacacgcctgacggttttcaagaccgttcccttcagccggacttgggtaatcctccaaaatagtccgtacgggattcgaacccgtgttaccgccgtgaaaaggcggtgtcttaaccccttgaccaacggaccaaactttatgggcacgagtggactcgaaccaccgacctcacgcttatcaggcgtgcgctctaaccacctgagctacgcgcccaagttaaaaacttggtaatttgaacaaagttcaaagcgggtgacgagaatcgaactcgcgacaacagcttggaaggctgtagttttaccactaaactacacccgcttaaatgggagttaacgggatcgaaccgctgaccctctgcttgtaaggcagatgctctcccagctgagctaaactccctagagctaagcgacttccatatctcacagggggcaacccccaactacttccggcgttctagggcttaacttctgtgttcggcatgggtacaggtgtatctcctaggctatcgtcacttaactctgagtaatacctactcaaaattgaatatctattcaaaccaagaaaaccgttcgctttcatattctcagttactttggataagtcctcgagctattagtattagtccgctacatgtgtcgccacacttccacttctaacctatctacctgatcatctctcagggctcttactgatataaaatcatgggaaatctcatcttgaggtgggtttcacacttagatgctttcagcgtttatcccttccctacatagctacccagcgatgcctttggcaagacaactggtacaccagcggtaagtccactctggtcctctcgtactaggagcagatcctctcaaatttcctacgcccgcgacggatagggaccgaactgtctcacgacgttctgaacccagctcgcgtgccgctttaatgggcgaacagcccaacccttgggaccgactacagccccaggatgcgacgagccgacatcgaggtgccaaacctccccgtcgatgtgaactcttgggggagataagcctgttatccccagggtagcttttatccgttgagcgatggcccttccatacggaaccaccggatcactaagcccgactttcgtccctgctcgagttgtagctctcgcagtcaagctcccttatacctttacactctgcgaatgatttccaaccattctgagggaacctttgggcgcctccgttaccttttaggaggcgaccgccccagtcaaactgcccgtcagacactgtctccgatagggatcacctatctgggttagagtggccataacacaagggtagtatcccaacaacgtctccttcgaaactggcgtcccgatctcatagactcctacctatcctgtacatgtggtacagacactcaatatcaaactgcagtaaagctccatggggtctttccgtcctgtcgcgggtaacctgcatcttcacaggtactaaaatttcaccgagtctctcgttgagacagtgcccaaatcattacgcctttcgtgcgggtcggaacttacccgacaaggaatttcgctaccttaggaccgttatagttacggccgccgtttactggggcttcaattcataccttcgcttacgctaagcactcctcttaaccttccagcaccgggcaggcgtcaccccctatacatcatcttacgatttagcagagagctgtgtttttgataaacagttgcttgggcctattcactgcggctgacttaaagtcagcaccccttctcccgaagttacggggtcattttgccgagttccttaacgagagttctctcgctcacctgaggctactcgcctcgactacctgtgtcggtttgcggtacgggtagagtatgcttaaacgctagaagcttttcttggcagtgtgacgtcactaacttcgctactaaacttcgctccccatcacagctcaatgttatagatataagcatttgactcatatcacacctcactgcttagacagacacttccaatcgtctgctttagttagcctactgcgtccctccatcactacatactctagtacaggaatatcaacctgttgtccatcggatacacctttcggtctctccttaggtcccgactaacccagggcggacgagccttcccctggaaaccttagtcttacggtggacaggattctcacctgtctttcgctactcataccggcattctcacttctatgcgttccagcactcctcacggtacaccttcttcacacatagaacgctctcctaccatacctataaaggtatccacagcttcggtaaattgttttagccccggtacattttcggcgcagggtcactcgactagtgagctattacgcactctttgaatgaatagctgcttctaagctaacatcctagttgtctgtgcaaccccacatccttttccacttaacaattattttgggaccttagctggtggtctgggctgtttccctttcgactacggatcttagcactcgcagtctgactgccgaccataattcattggcattcggagtttatctgagattggtaatccgggatggacccctcacccaaacagtgctctacctccaagaatctctaatgtcgacgctagccctaaagctatttcggagagaaccagctatctccaagttcgtttggaatttctccgctacccacaagtcatccaagcacttttcaacgtgccctggttcggtcctccagtgcgtcttaccgcaccttcaacctgctcatgggtaggtcacatggtttcgggtctacgtcatgatactaatccgccctattcagactcggtttccctacggctccgtctcttcaacttaacctcgcatcataacgtaactcgccggttcattctacaaaaggcacgctctcacccattaacgggctcgaacttgttgtaggcacacggtttcaggttctatttcactcccctcccggggtgcttttcacctttccctcacggtactggttcactatcggtcactagggagtatttagggttgggagatggtcctcccagattccgacgggatttcacgtgtcccgccgtactcaggatactgctaggtacaaagactattttaaatacgaggctattactctctttggctgatcttcccaaatcattcttctataatctttgagtccacattgcagtcctacaaccccgaagagtaaactcttcggtttgccctcctgccgtttcgctcgccgctactaaggcaatcgcttttgctttctcttcctgcagctacttagatgtttcagttcactgcgtcttcctcctcacatccttaacagatgtgggtaacaggtagtacctgttgggttcccccattcggaaatccctggatcatcgcttacttacagctacccaaggcatatcgtcgtttgtcacgtccttcttcggctcctagtgccaaggcatccaccgtgcgcccttattaacttaaccttattttttgacctttcagtcataaactcttattaatactacagcgttttcggtttattttcttgttactatttgatatagatattcaattttcaatgtgcattacttggtgatctctcaccaatggagcctagcgggatcgaaccgctgacctcctgcgtgcaaagcaggcgctctcccagctgagctaaggccccacaagacctctcaagactaaacaagaccaatgcgcagttccttatccttagaaaggaggtgatccagccgcaccttccgatacggctaccttgttacgacttcaccccaatcatctatcccaccttaggcggctggctcctaaaaggttacctcaccgacttcgggtgttacaaactctcgtggtgtgacgggcggtgtgtacaaggcccgggaacgtattcaccgcggcgtgctgatccgcgattactagcgattccgacttcatgtaggcgagttgcagcctacaatccgaactgagactggctttaagagattagcttgccgtcaccggcttgcgactcgttgtaccagccattgtagcacgtgtgtagcccaggtcataaggggcatgatgatttgacgtcatccccaccttcctccggtttattaccggcagtctcgctagagtgcccaactaaatgatggcaactaacaataggggttgcgctcgttgcgggacttaacccaacatctcacgacacgagctgacgacaaccatgcaccacctgtcacctctgtcccgaaggaaaactctatctctagagcggtcagagggatgtcaagacctggtaaggttcttcgcgttgcttcgaattaaaccacatgctccaccgcttgtgcgggcccccgtcaattcctttgagtttcaaccttgcggtcgtactccccaggcggagtgcttaatgcgttagctgcggcactaaaccccggaaagggtctaacacctagcactcatcgtttacggcgtggactaccagggtatctaatcctgtttgctccccacgctttcgagcctcagcgtcagttacaagccagagagccgctttcgccaccggtgttcctccatatatctacgcatttcaccgctacacatggaattccactctcccctcttgcactcaagttaaacagtttccaaagcgtactatggttaagccacagcctttaacttcagacttatctaaccgcctgcgctcgctttacgcccaataaatccggacaacgctcgggacctacgtattaccgcggctgctggcacgtagttagccgtccctttctggtaagataccgtcacagtgtgaactttccactctcacactcgttcttctcttacaacagagctttacgatccgaaaaccttcttcactcacgcggcgttgctcggtcagacttccgtccattgccgaagattccctactgctgcctcccgtaggagtctgggccgtgtctcagtcccagtgtggccgatcaccctctcaggtcggctatgtatcgtcgccttggtgagccgttaccccaccaactagctaatacaacgcaggtccatctggtagtgatgcaattgcaccttttaagcaaatgtcatgcaacatctactcttatgcggtattagctatcgtttccaatagttatcccccgctaccaggcaggttacctacgcgttactcacccgttcgcaactcatccggagaagcaagctcctccttcagcgttctacttgcatgtattaggcacgccgccagcgttcgtcctgagccaggatcaaactctcattaaaagtttgagttctcactcatttctgtcactgacagatttattgttttttcattgttcagtactataaccttagttatagtgccctgcacattggttcgtcttgttcagttttcaaaggtctttgtcacttgcttctctcaagtgacaactatattagtatatcacagtcgctttcgcttgtcaacacttttttgaaacttttttaactttttttcatcaaatgcctcaaccgcaacataccatagtccgtacgggattcgaacccgtgttaccgccgtgaaaaggcggtgtcttaaccccttgaccaacggaccagagttgttattttcaactcttactattatacaggctttttctgacttgtcaactactttttctgtttttttcaaattaagtaaaaagagccagaattatactgactcttctattgattattaaacttagaagcacgttcttctccccaccaatagggcattagttctgcaactttaaccgtctttcttgtatcgtagtccatcatgacttctgcgtccttattttcagcgttcaactctaagaggaactctctgcaagcgccacaaggcatacccgaacttccaccataaggtggttgctctcgaaaggctaagacttttttaaccttagtttgtcccgaaaattggtacatattgaagagtgctgcccgctctgcgcagagatggaaaacaccacaggttccctccatacagaatcctgtaaatatttgtccatcttctgcttctactgcggcaacgacatgattcgcataaacaaaatcagatacttcatgtggattatacaatttctgtgcttcttcgtacatcttttcccagatatccattgttgcatccttcttatttagagatttcttttagcatgttttcgatatgctggattgatttttcacggcctaacaagaagatagtatctggcaattctggtccatgcatttcacctgaaactgcgatgcgaattggcatgaagagatttttccctttgatacctgtttctttttgaacagctttgatttgtgggaagatattctctgttacaaattcatcatctgtcatcgcttcaagttttgctttgaaggcttcaagaactgttgggactgtttctcccgccatgacttcgcgctctgcttctgtcaattctggaaaatctgagaagaagagatctgtcaatgggataatctcatctactgatttcatttgtggtttatagagctcaactaatttttcagccttgtcagttaaacggcctgcttcctctaagaatggttttgccatttcaaagatagtttctaggtctgcattcttgatataatcattgctcatccagtcgagttttttctggtcaaaggctgctggagacttgctcaggcggttttcatcgaaaagtttaatgagttcttcacgagagaagatttcatcttcgccacctgggttccaaccaagaagagcaataaagttaaagactgcttctggtaaataaccttttttacggtagtcttcgataaactgaagggtgttggtgtcacgtttagacaattttttcccagtttcagagttgataatcaaggtcatatgaccgaactctggagcttcccaaccaagtgcttcatagaccataagctgttttggtgtattagcaatgtggtcatctccacggattacgtgagaaatttgcatatcatggtcatcgatgacaacggcaaagttgtaagttgggtaaccgtctttcttttggataacccagtcaccaccaatattgccaccttcaaattcgatatcacctttaaccatatcatgccacttgtagatacctgactcattgaccgccaaacgaactgttggaatgataccagctgcttcacgttctgcgatgtaagctgctttttcttcttcactcataccaaggtattcgttaatgtagcgaggtgtttcaccagctgcttcttggcgttcgcgttcagttgccaactcttcttctgtaacgtaagatttgtaggcttttccttcaactagcaattgatcgatgaatttttgatacaagtccaaacgctcagactggcggtaattttcatgtgtttctgggctttcatcccaatccatacctaaccaacgaaggttttcaagttgtgaacgttcaccatcttcgacatggcgtttacggtcagtatcttcgatacggataataaaagttccaccatgatgacgtgcgtaaaggtagttgaacaatgctgtacgggcattcccgatgtgtagtagtcctgttggacttggtgcgtaacgtacgcggatatcttttgacatagtttctcctataaagtctctaggcgtctgcctttttgctctctatattatatcacaagtcttggctgaggccaatttctatggataaagagagtaaaaagagtggacaagccactcttttcttctattatagacgtgcgttaagttctttgctcaattcttcaaatcctggttttccaagaagggcaaacatgttacgtttgtaagcttcaacacctggttggtcaaatgggttgatagcattcaagtaacctgaaagagcgatagccaattcgaagaagtagattgtgtaaccaagagtgaaagcatcttgctctggaagagtcacgtacatgtttggtacatcaccatctgtgtgggcaagaagaacaccgtcagttgcttttttgtttacaaagtcaacgtcttttccttgaaggtaaccaagtccatcaaggtcttcttccaagctagggataatcacgtttttacgaggtttgtcaacacggacaactgtttcaaacatgatacgagttccttcttggataaattgaccaagtgagtgcaagtcagttgagaagttggctgaagttgggtagatacctttttggtcttttccttctgattcaccagccaattgtttccaccattctgagaagtattgaagtgatggctcgtagtttaccaagatctcagttgcatagcctttacggtaaaggatgttacgaactgctgcgtattggtaagcttcgttttcagagattttatctgaagtgtagtctttgcgagctgcattcgcaccttccataagggctttgatgtcagctcctgatgctgcgattggaagcaaaccaacggctgtcaatactgagaagcgtccaccgatatcatctggaacaacaaatgtttcccaaccgttagcatctgcttcaaccttaacagcgcctttttggcggtcagttgttgcatagatacgtttgtttgcttcttcttgaccgtatttcttaaccaaaagttctttgaagacacggaaagcgatagctggttcagttgttgtacctgatttagaaatcacgtttaccgagaagtctttgtcagctacgtactctaccaagtcagcaaggtaagtagatgagattgagtttcctgcgtaaaggatttgtggagccttgcgttcttcttttgtttgcaagtttgcaaagtggtggttcaagaagtcgattgctgctttcgcaccaaggtaagatccaccgataccgattacaaccaaaacatcgctgtctgatttgatttgctcagcagctttcaagatgcggtcaaattcttcgcggtcatagttttcaggaaggtccaaccatcccaagaagtcgctaccagcaccagttcctttacggatcaattcatctgctgctgttacttgtgattgcatgtattccacttcatgtggtgcaacaaatttgtctaaaacttttgaataatcaaatttaatatgtgacatgttattcctccaatatttcttcttttctatcataacgcttaccttcgtttttttcaagttttttgtcgaatttctccaatttttatcagaattcaaacgtttgcgtaaaaatcccacattccaaaaattttgaaaaaataaaagaaagaacgactagatgttccagtcgttacagttcattcaataaatactcaaataattctaaattgccatcttcttcattaaccagaaactctggatgccactgcaaaccaataatgcggtgctcatcgatagactcaatcgcttcgatggtctggtctcttgggtcaatagcagttacacggaaattaggtgccaaatctttaatactctgacgatgaacggaattaacttgactttcttttccaaataacttagccaccacacttccttctactgtctcaatagaatgagatgtcccgaaaggtagtccttgccagtggccttcgatttcttgattgagagttcccccaaaggcaacattgacaagttggacaccgcgacagattgccatgattggtttattctgacgaagcgcttctttcaagagcgccaattcaaattcgtcacgcactaggttgtaatcatcactctcgatggtctttttctctccataaaactgaggatggacattttgaccgcctgtcaagataagtttgtcaatcatttctacataatcgcgaacaactgactcatcaccaacaggaatgactaaagggagaccaccgacttgacgaatgctctctgcgaatctacaagatacagatgaatgaatgtttttgccctctgcgtctacgggacatagatttgcagcaactcctacaaccgttctagccatgatgcctctcctttcgaatgttaacgatagtcttatcatatcactcaaaatgactttcgtctaatatgtttttttaaggctgtgataaatattttttatggacaagaaaaagctgcccaaggggacaacttttttcttattcaaaaacaaattgattgtgatagagttctgaatagaagccacccagtttcaagagttcatggtggctaccgcgttcaatgacttctccatctttaaggacaataatctggtctgcattgaggatagtcttcaaacgatgggcaatgacgaaactagttctgcctgctacaaccgcctccatggcatgctgaatcttgctttctgtcacagtatctacgttcgaagtggcttcatcgagaatgagaacctctggatctgtcatcagggttcgagcgatagaaatcaattgcttttgtcctgtcgagaagatgctctggtcatcatctataagagtatcgtacttatcaggcaagctttcgatgtagtcgtgaatatgggttgccttggctgctgcctcaaccatttcttgactagcatctggcacaccaaaacggatattgtctcgaatcgttccgctaaacaagaccgaatcttgcaagacaattcccaccttgcttctgagactatctaaatcatagtcacggatgtctttaccgtcaaaataaatcccaccagcattaacatcataaaagcgattgatgaggttcataatagtcgttttccctgacccagtcggaccaacaaccgctgtcatctggcctttaggagcagaaatgctgacatctttcaaaatgggtttatcaggcaagtatgaaaaatcaatatgactaatttcaacaccttcttgcaactgagtgaaggtcggagcatttttaggtcgaatttcttcctctgcatcaaacatttcctgaatccgttcagcacctgtaaaggctaactgaaggcttccccaacttgccgcaacttgaataataggctggtagtactgctgtgaaaattgggcaaacataacaatcaaacctagggctgtacttgtttcaatagacttatcattcaaaagtacagctgaaccagcaaagatgacgatggctgtgttgaccagactcatcccattcatgacagggaaaagaattcctgagaacattcttcctttaaaggttgccttgcgcacgcgctcattttgttcaagaaatcctgccatcatatcctcttgaataccttgcacaatcacggctttttgacctgagatactttcatccatataggcattgagcttccctacctctttctgctggaggttggtatatttccgtgccattttcacgataaaaatcagcatgagaaaggccactggtgtactggcaatagtgatgagggccagcgtcacatttctcgaaaacatgacaagaatcagaccaatgtatagaacgatgttgctcatgacctgaatcaagctttcgttaaaagcttggaggatattatccaaatcactggtaaaacgagacaggatatcgccatcttgtcggcggtcaaagaaagaaacagtcaaccgagcaagcttgccaaagaggcctttgcgcatctcgttggtcgattctgcaatcacgcgcgtcatgagacacatgtatatcacactggagataaatagaaccaaaactagcagaccaagattgaccatgattcctgataggctttgccaaacaagttctggattgccattttgataagcttgaactaaattagctaactctgttaccgcttgtccagaaaataccggaaagagagcttgggcaagagtcgccagaacaatcatcaggataacaactacaaatgatagcttatagactttaaaataattccaaaaaaattgaactgtcttcattttactcctcctttcctttctgtgtttcgtagatttcacggtaaacggaattgttggcaaccaagtctgcatgcgtaccttgaccaatcaatcgtccttgatctagaaccaagattttatctgcatgaacaaccgagctaatcttttgagcgatgataatggttgtcgttcccttcaagtccttattcaaggcttcctgaaccaggcgctctgacttggcatccaaggctgaggtcgaatcgtcaaaaatcagaatacgtggattgctgacaattccacgggcaatcgacatcctttgtttttgcccacctgaaaagttggttcccctttcttcaactggactttcaaaggttttctccatacgatgaatgaattcactggcttgagcaatattggctgcgcgctccatttcaaataaagtagcatctcccttaccctgtctcaagttatctgcaatcgttccactaaagagaatggcacgttggagaacgatagaaactgttttacgcagggttccttcactcacttctcgaatatccttgcctccaattttgatagcaccctcctgtgggtcaaagagacgtggaatcaattgagccaaggttgattttcctgcaccagtcgctccaacgacaccaaccatttgaccaggttcgatagtaaagctcacatctttcagcatcggttccttgtccattggataggtaaaggttacattttcaaagctaagacttcctaccaagtcttcatctggcacatccttgaaggtcatggctggctctgcgtcaagaatttctcgaatacgacgcatagaaatcatagcacgactgacagaatttcccaaaaatccaaccatgacaatggtaaagataatctggctcaggtaattgacaaaggaagcaatggagccaacaactgacggatccgactgaaccatccccgcaactagccaaatagagaaaaataccgccccataaccgaccaacatcatgaaaggttccactactgaaaaggcataaccgatgtaaagattttgaccgagtagctcgtctgaaacctccgtaaacttagcaaactgctctttttcttggacaaaggacttgaccacacgaacgccacgcaaattttcctttgcaatggcattgatgcgttcaagaagggtttgaaacttggcaaaacgaggccccatcatacccatcatgacagcagtcaaaccaaaaatcaagactaccatgagaacaatcacccaccacagagaaggtaaggtttgaaccgccaagataaacgaaccgatgaacaagagggggagcctgaaaagaatttggaaggtcatcatgacgacgttctgaatctggttgatatcatttgtcattcgaacgactagatttcccgcattaaattgttcaatattagcataagaaaatgtttggattttacggaaggcatcctcccgaaggtcagatgaaactccttgggcaatataggctgcgaggacaacattgagcccaccagcaaccaaaccgagcagggccacaccaatcaaccaagccccgatactataaatagcttcatagttcccagcaaggagggcatctaacacttcctgcagataacgcggctgcagaagtgaactagcaaccatcaagcctgtcatcaggagcgaagccaaggcctgccacttgtaggtttttattttctgaatcagcatactttctccttaaaaaatagacaaaagggagcgacaatgtgtcagctccttctcattctgtttgtgtgatgttattctagcaaaaaagtgagaacttgtcaaagaagtctccttgatacagctagaatgactagtaattttctctttatagtttctgttttaactcgaccaagacattcatagcttgcatgggtgtcatattgtaaacatccaatttagctaattctgctaggataggatgctcttctgccgtatcaaagagtgaaatctgttcagtgacggcacttgtttgtctcatgggagcaggactttctgttccttgactctctagctgagtcaaaatcttatccgcccttgctaaaaggtctgctggcaagccagcaatcttggcaacatggataccgtaggatttatcggctggtcctggttcaatcttgtgaaggaaggtgacctgcccatcctgctccaaggttgccacgtggacattgaccaagtgttgtaaactagactccagactagtcaactcatggtagtgggtcgcaaagagggtcttggctccgatatgctcgtgaatgtattcgattatagactgagcaagagccataccgtcgtaagttgcagttccccgtcccaattcatcaaagagaatgagagagtccttggtcgcatgcgaaatggcattgttggcctccatcatctccaccatgaaggttgactgacctgaaaccaagtcatctgctgctccgatacgggtaaagatcgcatcaaaaataggtaaataggcgctttctgccggtacataggaacccatctgggccattatcgccgtcatggctaactgacgcatataggttgacttcccactcatgtttggccctgtaatcagttgaatactggtatcttctgccatctgaatcgtatttggaatataggtctgagcccccataaccttttcaacgacagcatggcgccctttctggatatcaattcgcgaatcatctccgaattcaggtcgaatcaaatgctgggtttcagccacaaccgccagactctgtaagacatcaactgtagcaattccttgggctagagcttgtaaacgctggatgtacttgctaacctcttcacgaatacgcataaaaatttcgtactctaggttagctgacttctcacgtgcctccaacatatctccctcgatacgggctaattcttcggttccaaagcgttctgagtttttcagcgtcaccttgcggaaaaagtgagcaggcacatttcccagttgcgaattggtcacatggaaatagtagccatcctttttattgtagtcaatcttaagcgtgctgataccagagttttctcgctccttagcctcaatttcagcaatccaactagtcccttctctgagaacgcgacggtacttgtctaaggtctcatcaaagccagtccggataattcctccatctgtaatcacatgaggagcttcaggagcaatcgctgcgctaatcaaactctccaactcagggattccatccagttgttcgatgagataagctagagcaggttgctccattccttctaaaatcgcacgaatccgtggcacactagacaaggtggtcgctagctgcaagagatccttgggattggttttgccaaaagaaacacgactagccaagcgctcaatgtcataaacacccttgagactgtctgtcaaatcactacgctcaaagaaatggtcgagaaagacctgcacaacttcttggcgttggacaattcgttccttatcaatcagggggcgatgaatccaagaccgcaagagacgcattcccatagctgttttggtttcatccaaaagccaaaaaagactaccttgcttcttgcctgaacgggcattctcaaccaaatccagactagccttggtcgcataatccatctgcaaaaaatctttgatttcatagcggataacaggcttgaggtggttcaattccctcatctgagtccgatgaacatactgaagcagtttactagatgccgcttgctccacagctgccaatcgtgaatccagtaaatgaaggtcttcaaagccttctttttcataggaaagtaccagattcatctgacgactaaggatctgttcttcttcctcagacaagtcataacccagcaccacttctcgagccttgagattgcggatttccccacaaaccagcgtaaaatccaaaagacctgtcacataaaaaacacccgtcactaggtccatataagcgaggccaaattgactgccatcacggtctatggcaaccaagaaattgttctgactgtccggcttactactgtcgaccactgttcctggcgtaatgacctgaacaacctctcgtttcacaactccaacagcttgtttaggatcttccatctgctctgcgatagctaccttatagccctgctcaatcaagacatcaatgtactgttgggcagaatgatagggaacacccgccataggaatcggattgtccgcattcttgttgcgactcgttaaggaaatttccagaatctgcgcagcattgaccgcatcctcataaaataattcataaaaatcacccatccgaaagagcaaaaaagcatctggatattgctttttaatatccacatactgttgcatgccgggggatagcttttctgtcgccattttccgtctctccttgtcaaaaataagtcttgagagcaactcccaagaccttacttatctttcatcaaatctagcaaacgatcttccatgagtttggcaacgtgctggtctcgacaaatgaccaataaggtattggcaccagcaactgttcctaaaatccattcatccttgtttgcatctacaatatttgccaaaacagaggcttctcccaatttggtatgaagtaccaaggtaaactctgctcttgcaacaccttctaaatgatgagacaaaaattccactaaatcaatcttttctgtctcatttgctagtacataatacaccatatcatttttcttgaccttggtcaagccgatttcgcgcaaatcacgagacaaggttgtctgcgtcacaaagacattgtgcgcctccaaccgatcttgaatttctttttgtgtacttaatttctcctcagtaatcattttttttattaactgatgacgatctctttttctcataaaatcctcttatatgcatatttataactaattttataactatattataccaaaaaaataggagatttcaaaaattttttcttctttctttaaaattgtgataaaatagtagaaaagtccaaaaaggagctcttaatgaatacaaaagaattgattgctagcgaattggctagcgtcattgatagcctggaccaagaggctattttaaatttactggaaacccctaaaaactcagaaatgggagacatcgctttccctgctttttctcttgcaaaagtcgaacgtaaagcacctcaaatgattgcggctgagctggctgaaaagattaacagccaagcctttgaaaaggttgtcgcaacaggaccttacgttaacttcttccttgataaaaatgccatttctgctcaagtattgcaagctgttatcactgaaaaagaacactatgctgaccaaaatattggtaaacaagaaaatgttgttatcgacatgtctagtcccaatatcgctaaaccattttctattggtcacctacgttcaaccgttatcggagatagcttgtcacatattttccaaaaaatcggttatcaaacggttaaggtcaaccatttgggagactggggtaaacagtttgggatgttgattgttgcctacaaaaaatggggcgacgaagaagctgtaaaagctcatccaatcgatgaacttcttaaactctatgtccgcatcaatgctgaggctgaaaatgaccctagcttggatgaagaagcacgcgaatggttccgtaaacttgaaaatggagacgaggaagctctcgcactttggcaatggttccgtgatgaaagtttagtggaatttaatcgcctttacaatgaactgaaggttgaatttgacagctacaacggagaagccttctacaacgataagatggatgcagttgtagacattctttctgaaaaaggtcttcttgttgaatcagaaggtgcccaagttgtcaatcttgagaaatatggaattgaacatccagccctcatcaagaaatctgatggtgcaactctctacatcacacgtgacttggctgcagccctttaccgtaaaaacgaataccaatttgctaaatctatctacgttgttggtcaagaacaatctgcccactttaaacagctcaaagctgtcttgaaagaaatgggctacgactggagtgacgacattactcacgttccttttggtttggttacaaaagaagggaagaaactctctactcgtaaagggaatgtcatcttgctagagcctactgttgcagaggctgttagccgtgccaaggcccaaatcgaggctaaaaatcctggacttgaaaacaaagaccaggtagcgcatgctgttggggttggagccattaaattctatgacctcaagaccgaccgtacaaatggatacgacttcgacctagaagctatggtatccttcgagggtgaaactggtccttatgtacaatatgcctacgctcgtatccaatcgatcttacgtaaagcagacttcaaaccagaaacagctggcaactatagcttgaatgatgctgaaagctgggaaatcatcaaactcatccaagacttcccacgtattatcaaccgtgcggcggataactttgaaccttctatcattgctaaatttgcaattagcctggctcaagcctttaacaaatactatgcacatacgcgcatcttggatgaaagcccagaacgcgacagccgtctagccctcagctacgcaaccgcagtcgttctaaaagaagcccttcgcttgcttggagtagaagcgccagagaagatgtaaatcgccaaagttacttgattgcaaagcaatctaagtaactaacgccaaatcctgtcaggaatttggctaggcacttcactagtaaagaaacataaatattatcgatttatgtttctttacgtcgtaaccagagacacttgcctaaacgcctcactaaattggtcaaccaaatctattaattggcttagtggctggtggcaatcttcaagtcactagaatgcaaggcaatctaagcaacgaatgtcaaaccctatcagggatttggttaggcgcttcactaattcaatctactcactactacttctttatcatacagggagatattctatgagccaatatgcttatatcctcgttgtaattagcttggtgttcctttttctgctcaataagtacgagaaggagagactgcaaaaactctaccaagaacaacttttgaaggatgaaacatttaggactgatatcaaagagaaaattcacacgactgaaaatatcaatgatgtcattgcttacatcaataaaacttatcatctgggaatgttgctatcaaaagacattacagatcaattgaaataaaccgagttattctttaaggaatataaaaaccgagtctaagagtttaatacttaggctcggtttttatatatttttcaagtaacaaagcaaccactcccccagcaatgcaagtgcaaaatcctccagaatatgatagaataagagaaaggactctatcaaggaggaaaacatggaaaaacaaaccgtcgccgtcttggggcctggttcttggggaactgccctttcacaagtcttaaatgacaatggacacgaggtacgtatttggggaaacattcccgagcaaatcaatgaaattaatacacaccatactaataaacactactttaaagatgtcgttctagatgaaaatatcattgcctacaccgacttatcagaggcactgagagatgtagatgcgattttgtttgttgtcccaacaaaagtgacacgacttgttgcacaacaagttgcacaaaccctagaccataaggctatcatcatgcacgcttcaaagggattagaacccgatagccataaacgattatcaaccatccttgaagaagaaattcctgaacatctccgcagtgatattgtcgttgtttcaggacctagtcatgcggaagaaaccattgtacgtgacctgactttaatcactgctgcttctaagaatttacaaacagctcaatacgttcaagaactctttagtaatcactacttccgactttataccaatacggatgttatcggggtcgaaaccgctggtgctcttaaaaacattatcgctgtcggtgctggagccttacatggtttaggatttggtgacaacgctaaggcagccatcatcgctcgaggcttggcagaaattacccgcctaggggtagcactcggtgccaatccattgacctatagcggcttatctggtgtgggagatttgatcgtaacgggaacctccatccactctcgtaactggagagctggagatgctcttggtcgtggagaatctctagctgatattgaagccaatatgggcatggtgattgaaggaatttcaacaactcgagcagcctatgaactagcgcaagaacttggagtctatatgccaattacacaagccatttaccaagttatttaccacggaaccaatattaaagatgccatttatgacatcatgaacaatgaatttaaagcagaaaatgagtggtcttaaccctctaaagaaaggattcttatgacatcaaaagttagaaaggcagtcatccctgccgctggactcgggactcgatttttaccagcaaccaaagcacttgctaaagaaatgttgccaattgtagataaaccaactatccaatttatcgtagaagaagctcttaaatcaggtattgaagatattctggttgtcactggtaaatcaaaacgttctattgaagaccactttgactcaaactttgagcttgagtacaacctcaaagaaaaaggcaaacatgacttactaaaattggtagacgaaacaactggcattcgccttcactttatccgtcaaagccatcctcgtggtcttggcgatgctgtcttacaagcaaaagcttttgtagggaatgagcccttcgttgtcatgctgggtgacgacctaatggatatcacagatgaccacgctgtccctttgacaaaacaattgatgaacgattacgagacgactcacgcatcaacaattgctgttatgcctgtccctcatgaagaagtttcagcatatggagttatcgctcctcagggtgaagggattaatggtctctacagtgtcgaaacttttgttgaaaaaccagctccagaggaggctccaagtgatctagctattatcggtcgttatctgctcacaccagaaatttttgagatcctcgaaaatcaagctcctggcgctggaaatgaaatccagcttaccgatgctattgatacacttaataaaacacaacgtgttttcgcccgtgaatttacaggagctcgttacgacgttggggataagtttggttttatgaaaacatctattgactacgccctcaagcacccacaagtcaaagatgacttgaaagattacctcatccaactgggaaaagaattggctgagaaggaataacaaaaaaagataaggttcaaaaatgccttatcttttttattacataactattcttataaaccttcacaaccccattcccttgtagagaagtaagactgcaagtcctacaaacaagactaccgctcctaacctctggctggtactatacatccgtctttctcctcgaactggaaagataattgctagaaatgctccaccaactgctcccccgatatggcctgctaggctgattcctggaatcagaacacttccaataatattaaccacaaaaagtgtcagataggattgccccaactgctggatataaggattacgcgtagcatagcgaagaatgataatcgcggcaaatagcccatagagagaagtagaagctcctgctgctaaggattttggactaaatacaaaaacaaagagattgcccatcattccagataagagatagagaaagaaaaacttcttggatccgaaaatttcctctacttgtctaccaagataataaagggaaaacatattaacaatgaaatgctcccaaccaatatgaacaaaaatggcagaaaagagacgccaaatctgctcgggaaagagccgaatagcaggcccatacatggctccaaatcgaaataaggtatccgccctgtcaaagtttccacctgtagtcaccaacattagtagaaacaccaaggccgtcactaagaggaagaaactcgtcacagggtaacgcctatcaaagatttctttcatcaatcagtacctcctgaacaggaatatcatgcttttcagggataaagtcctgaatttgacaaggataaaccgtactcaaagtatgaccagaagaatgttccagatagcggtcataatagcctccaccgtatccaatccgatatccttccgtcgtaaaaaccagaccaggaacatgaatcaaatcaatctgagaggcatccaccacttccaaatctccctgtggttccagtaatccaaaggaagttttgaccagttgttgcggacgatatactacaaactccatgcgccccttgggataggttttgggtatcagaaccttcttgccatccttctgcgcctgctcaatcagttcctgcgtttgaaattcgtgcggaaaagagagataggttgcgatgatcttagcttcttggtaaaaggggtgttgtaaaagtcgctcagttaaagcttggtctataaactgtttttgctctcgagggttagccttcatttcttgcaagacttgcttccgtaattccgatttcatagacaacccctctactctgctgccttctttttcaggaaactagagaccgcatccactccaatagctaatgcttcttccttaggactcatctgagggtgatgaagggcatagggactatcaatacctagccagaacataacgccatcaacttttgaaaggagataaccaaagtcttcacctgtcatagcaggttcgatatcaatcaactcaattccttctttttcctcaaagaaatccatcagttcacgcgccaaggctggatggttctcaacaggcaggtaaccaccttgtttgagttccacttcgacttccatattgaaggcagctgcaaccccttctgcaactgttttgacccgcttttgcaccaagagactcatatcctgtgtcaaagcccgaatagttccatgtaaaaaggctgtgtctgtgatgacattgtttgttgttccggcttggaaaagaccaaaggtcaccactgctccctcgattgggttgacattgcggctgacaactgactgcacttgggtcacaaagtaactagccgccaccaaggcgtcattagcttcatgtggaaaggctgcatgtcctcctttgcctttgaaacgaatcttcacctcgcaagtcccagcaaagagtgtatgagtattggtcgcaatctgtccaaccttcaaatctggccgaacatgaagtccataaaactggtctggcaaccagtctccaaaagcgtcatcctcatacatgagcatgccaccagcttcattttcttcagcaggttgaaacagaaagagcagattgttctttggttgctcctcaagggcgcgctcaagacagcccaaggcaatggtcatgtggaaatcatgtccacaagcatgcatacgaccttggtgctgagaagcgaaagaaaggcctgtttgttcgacgataggcaggccatcaatatctgttcgccaaccaatggtacgctctggctgacttccctgcaaataaaccaaaatccctgtccgccaagtacgaacttgaacaaaattcttgcccgcagtcaatttctcaatcacatctagcaaataagcatgagtcttgaactcctccaagccaatctctggaatctggtgcaaatctcgtctagtctgaatcaaatctaacatctatctatcctcctatatagcagaaagaggctggaaaaagggttccgcctctatttttcttttacaattacaaggtacgaagcgcatcctctagcgctgttttttgttgggtttgagcatcaatttctttgataatacgagctggaacacctgctactaccacgttttctgggacatcttgggtaacaatagctcctgctgcgacaactgaaccactaccgatttgaactccttcgatgaccactgcattagcgccgataagaacattgtctccaacacggactggttcagcgctagctggctcaatcacacctgccaaaactgcacctgcaccaacgtggctgtttttcccaacgatagcacggccaccaaggatagcacccatatcaatcatggtccctgcaccgatttcagcaccgatattgatgactgctcccatcatgataacagcattgtcaccaatttcaacctggtcacggataatggcacccggctcaatacgagcattgatagtacgtttgtctagcaaaggaactgcggaattacgagcatcttgctcaacaacatagtcttgattttctaccaaaccatcgagaagcggagccacatctttccagtctccgaatagaacatttcctagtttaacaacagagctaggtacagcagttgcgagttgtccctcaaaggttactttcacactggttttcttttcagcattggcgataaattgaataatttcttgtgcgttcatttttgtagcagtcataggcgcctcctagttcattttaatgatacctattctaccaaaaaaggcctcaaatttgaagcctttttgtttgtttttaggtatgatttttagggatgtgagataaaacgtgctgtcggtaaaagcaagcccctaccgatacaacctaaaaacactcttcacaactatctccccgtgttttattgactattctagtatagcacacttttagaattaagaaaagactttttatttactttctttcgcttcttctatcgataggaaaatcatgggcaaaataatcaaggccatagctagaagaagggaccaatccactaccaagcctaaaaataaaacactcaaaagggcagaagagagaggttcactggcactgataacggaaaccaccaaaggagaaaccaaggaaacagccttcatggaaataaaaaaagcaaaagccgtcccaaaaaaagcgataatgagacaaattaagatactccaaatatcaggagtaaaggaaagctgataaaccggcgagaggacattgctaaataaaccagccaaaatcatcccccacccaacggtgggtacaaaaccataacgcttagcaaaaggttgaggtaagataacattaaacatgacccccatggcactcagcaaacccgtcacaagtgctagtggtgtcatggataattgagagagatctccctttgtcgccatcaggcaaacacccaacatggcaaccaaaacataaagaatagcactttttgacgctcgtttttgataaaccaagcgattgtaaaagaggataaagacagggctaataaactgtaaaatagttgctgtcgctgcattagaatattctacgcagaggtagaaaaaatactgaactgaaaaaatccccaaaatagcataggctaaaaagggtaggtaatttttcttatctcgccaaatatctaacacttgcgattttaattgcactgcagaccaaatgagcacaagactccctgccagtgtcaaacgcatagaggtaatccagcccgaagacacctggtaatgagtaaagaaatactctcctaaaatcccacagattccccatattaagccagatagaagcgaataaatagttcctttaacaatctttttctgatactgattcatacctttattgtaacatgaaaggaaaaaagaaaaaagtggcaatcaataccactttcctatcttctactatttgattgtgttgaagatgaacttgatgcactgctagaactactacttgagctactacttgaacttggtgtagatgagaaactaccaataatacttgaccaagcattttggtaatctgcttcacttcctccaatagcaaagtgatagcttgtcgtaggagctcccgccttattagcccaataactcgttacagtagcccctgaaagatccaccgtttttccattaacggatactttgcccggcttttgccctgtagatttgaggacctgagattgggtcacactagaatcaagattaaagcgttcattgccccaaacaccaggctcagcctgttggatagcattgaccaagtaagccatatatttggcatttcgataatgcccagcccccttagccatcgggcggttgtcatcatgccctagccaaccacctagagtcaatcttggtgttgacagcatgagccacatattttcatcttcattagttgtaccagtcttaccaatccagtctgcacgagctaagcttgaattgatagaagccaaatccgtttggaaacttgaagtgatccgagatgaaatcacctcacgaagcaaactctgcataattgttgccgttgccttcgagtacacttgaactggtttgtcttggaattcatagattactctaccgtcaggtgattcaatcttagcaatcacatgtttctgatgataaacaccgttattagcaattgtttgataaccattggtatgctgggcaactgtgacttcaataccaccgcccataggcagactttcgataccgtactccggaatctcgtaacccattttctccatgtaacccttgacatcaacacccttctcacgaagcatgcgataggtccaataggctgggatattccacgaatagttcaaggcttcacctagggtcatcatgcctgtacctggactatttacatacatgataggatttccattagagaattttgtcggataattggacaagatactagcgcttcccatcaaaccttggtcaatggcaataccgtaggccaacaaaggcttggttgtagaggctggcgaacgcttggtgtcgaaggcgtgattgttttggttagtctggtaattacgaccaccaacaaagcctagaacagcccccgttttattgtccatcaaaacattccctacttcaggctgcccagtcgaatcatctaccaaacgaccgtagttagcaactgcattttgcatggcgttatggatttttttattgatcgttgtcgtgattttatagccgccattacttagttcctgctcagctcgctcatgataagccttttgaatcgactcgtttttcaactcttggctagagacattgtcctgttgaactaagtaatcatacatgcgatctgtagcttcagccatagctgtaaagtagagataatccctcgaaacaacattgatagatcctgatggcaagaaatcttgcttgagattataatccttgtactggtcgtattcttcctgagtcagagcacccgtacggtacatgttgtagagaacatccttggcccgcttcaaaccaagttctaagtcttcatcactctttaactctccagtattttcataaggggaataagtaatcggactctgtggcaaacctgctaggaaggcagcttggggaatactcagcttgttggcatcgataccgaaaatcccttcagcagcttgctgggcacctgcaatattctgccctttatgatttcgaccaaagggagcaacattgagataagtagtcaagatttcatccttactcatgctgcgttccaaggcaagggcatcaacaatttctgtagccttacgagccaaagtcggagcatctccaaccacttgttgtttgattaactgttgggtcaaggtcgagcccccgctagatgagcccaaacctgcaaaggttcccaaagtcgcccgaatcacagcttttggcacaaccccattatgttcaagaaaatgttcgtcctcagttgcaacgatagcctttttgagattgtccgatatttcctcagatgagacagaagttctcagtaaatcactctcgatagaagcaatgacactcccatctgcataaacaatttctgagatagaagaaatatttttaacctgcttgaccaagtcctccgattggggaaccttagccttgtcaaacaaagcaactccataaccaagagctacaccagcaccaaaaagtccaccgataaagcctagaataaagagagtattcaaaattcccttgatagcagctaaaatgctacctaagatagccagaactttcccacctgtcccatccgacttcttctcttctgagactttctctgattttttatgatttatttttgattttactagctggaaaaattccagcatttttcgttttaattcatttaattgattttgcatggatttcctcactttatctattataccataaaaggtaaactttcaataaaatagccactttcttccttattctactaggctattgcccaagtttgtgatacaatagttagaaacaatatttttaaaaaggagaaaagacacatgcacatttttgatgagctaaaagagcgtggtttgatttttcaaacgactgatgaagaagctttgcgtaaagccctagaagaaggtcaagtttcttattatactggctacgatccaactgctgacagccttcacctaggccaccttgtcgcaatcttgacaagtcgtcgcttgcagctagcaggtcacaaaccctatgcgctcgttggcggtgctacaggtctcatcggagatccgtccttcaaagatgctgaacgtagtctccaaacaaaagacacagtagatggctgggtcaagtctatccaaggacaactttctcgttttcttgactttgaaaatggggaaaacaaggctgtcatggtcaacaactacgactggtttggcagcatcagcttcattgatttcctccgtgatatcggaaaatactttactgtcaactacatgatgagcaaggagtctgtgaaaaaacggattgaaacaggaatttcttacactgagttcgcttaccaaatcatgcaaggttacgacttcttcgtccttaaccaagaccacaacgtaacgcttcaaatcggtggttctgaccagtggggaaatatgacagctggtactgaattgcttcgtcgtaaagctgataagactggtcacgttatcactgtaccactgattaccgatgcaactggtaagaaatttggtaaatcagaaggaaacgcagtctggctcaatcctgaaaagacttctccatacgaaatgtaccaattctggatgaacgttatggacgctgacgctgttcgcttcttgaagatctttactttcttgtcactcgatgagattgaagacatccgtaaacaatttgaagcagctccacacgaacgtttggcacaaaaagtcttggctcgtgaagtcgttactcttgttcacggagaagaagcttacaaagaagctcttaacatcactgagcaactctttgcaggaaacatcaaaaatctttctgttaaagagctcaaacaaggacttcgtggagtgccaaactaccaagttcaagcagatgaaaatcacaatattgtggaactgctcgtctcatctggtgtggttaactcaaaacgccaagcccgtgaagacgtccaaaacggagctatctacgtcaacggcgaccgcatccaagaccttgactatgtcttgagtgacgcagataagttagagaacgaactgactgttatccgtcgtgggaagaaaaaatactttgttttgacttactaaactattcaacatttatctataaacaaaggagttatcctcgagaaaggtaactcctttttgctgttaataaatctcatctatctatttttaatagacagactacgcagtacaatgcgcaaggttgttagattatgtaagatagagagatttgaaggactgagccaattaaacaagccaaagccaatcaaactactatttacgacaacggtatcttgaatattcttcttgatgagtgtttgcaaagatgatgatagcgaatccaactcttggaagaaatccaagcgattatctaacaataagatatcactcatctgcttagaaatatctgcactctcattcatcaccacaccgatatctgatagggttagagccgctgagtcattcaagccatctccaaccatcaaaatagtgtgacctgctttctgcagttcctctactaactcaaatttcccatcaggtttcaagtctgtatggacctgatcaaagggcaaatctttgactaattcctctgttctaaccagggtgtcccctgttgccagaatcaattttttcccttgtgccttaagtttctccaaggctgcttttgcttcttttctcaaaggagtatgaatgcagaacattccaatcaattcattctgataagccaagaataagagattatagtgactcttgtactcttcaattaaagcattttgttctgaactgatatgaatttgctcatcctgcatcaaaacataattcccaataagaactggttgcccatctatatgagatttgatccccttgcttgcgatatattggagtttcccatgcatttcctcatgttcaattccctctatctcagcttgcttgacgatagcattagcaataggatgataaatgtgttcctcaagacaggcactgattctgagaatatcttcctcactatagtccccaaaaggtaacaccttttcaactataggatagctagttgtgattgttcccgtcttatcaaacaagaaagtatcaacttccagatatttctccagaacatccccatccttaatcaccatttcacggttcaacccctccttgatagctgtcaaataagctacaggagtagagattttcaaagcgcaggagaaatcgaccaataggaaagaaatagccttagaaaaagaacctgttaataggtaagtcagaccagcccccaagaaattatatttgacgaccttatccgccatcttgatgaaatagcgttgtttcgttttcttgttttcttcagatttcttcatcaactcaatcagctgtaaaatccggctgttcatctgattatcggttacacgaatgcgtaactctccagtttccaatactgtatttgcacaaaccaaatcagactctcttttttcaactggaaaactctctcctgtcaaggaactttcgttgaccatacctaaacctgaaactacttgtccatcaaacagaatttcatttccttgagataggaccaagacatctcctatttgaacatcggaactcttgatactaacaaccgtatccccctgtactagaaatacatcgctctcttttgcaagaaggctttgttctaaatctgttgcagtttttttcaaggaccactgatctaaatgattccccaaatcaagcataaacatgatattgctagctgtcttggattggttcataaacaaggacaataaaatcgccgaacagtccaagacctccatcgttagttccttacgcgctagtgtttgataggcttctctaatatagccaaaagcctgataacaagtccatatatagcgaataggagacggtacaaaactacgaaaaagtatacgcttaatcgctgcacctgaaacaatagaataagcactctcttctctacgaatgggaagagtcatcaactcagaaactttccctttatcaattctttttaaaaaggcttctgcattatctaatacagaaaagccttcttttatgcgtagagtaaagtgctgttgatccatgtaaaactggatagactcaatccccttttcatctctcgccaaggaacgaagatagtcttgaatatccaaggtgagtgaaaaagaagatgatagtcggatatgttggtatcctctatgtagcactttaaaagacatattattcccctataaggctatctaattgctcttcttttttctcttgctcgtacaaatatttggcatcttgcaagacatcgtctccatgttgcttcacaacagaaacagatgcatctagctcgtcttttaacttataagccttagccaaagctttagaataaccttttttagcttccttacttgccaagattttcaaaccaagggtaccaaatgcgacaccacccaaaaagagtgatgattttttcgcaacttttgcgacggttaatacttcttttaacatacttatttcctccttatcattattatatagcaatttagatataaaagcaatgtcatttcataaattggagaa

SEQ ID NO: 71 - DNA, 22040 bp, Streptococcus mitis NCTC 12261 contig17
gaaataacagtgaaagctgttataggtttcttttgtgtagattgcatagctgtctcctttctttaatattctacgtcatttccgagcgccttaaattgaacaaagcttacaatagcaatcatgactgccaagaagacaccaatggtattagcatacccgtattcggtcaattggaaggctttttcgtaaaggtagtacatcaaggtacttgttgagtagtttggcccaccagatgttaatagttgaatcaaggcgaaaacttgaaatgagttaattgttgtgatgattgcgatgtagagagttgttggaagaaggcttggccatttaatcttccagaaaacttgaaattcagttgcaccgtctacacgagccgcttcaaccagtgaattgtcaatattccccatagcagctatgtagaggatgattggttgaccaactgaagttgtcaagaggataatcataattgccagtaatgcccagtgtttatctcccaaccaagaaatattctggctgatgatatggcttgacttaaggacaaagtttagaatccctgataatgggtcataaatccatttccaaacaactgttacggcaacactacctgttacaacaggaaggaagaagacgaaacggtagaaagatctggcaatagcattttgatggtaggtttgcgacgccacaaagagcgaaaagagaacaacaatcggtacagatccaacaaccaaaataactgtgttaatcaaagacttcataaagacagggtctttaaacatacgaatgtagttgtccaatcccacaaactcaaatttagtcattgaatagttaaagaaacttgtaatgaatcccataatcataggaaccaatacaaagatgacaaagaagaataatactggtgctaagaaagcgtaggaaatcactgtttcccgcatacgaattttattgactttcacagtcggcacctctctttcacaaatagaatattttggattttcttgaacagttttaaaatcaaaatgaaattttttaagattcgcttatgtaagaacttcattttaatttcgtgacagtttctgatatttcaaataaaatcctcccttttcttacatagattatgcacagggaaaagggaggagtcaatctgattcagtgcttattgttttgtagcttttttaattgtttcgttagctttttcagtgaaggcttttaaagcatccgctggtttttgatcgccatttgaaactgattgcaacattgggaaccatagagttctcatttctgcaaaaccatcaattgtattgtagtatggtgagtagtatttagtccaaccactgattgtttccatacgtttatcttcataaagttttccaaatgaagtacgaactgggaaggaactttcgttgaccatacctaaacctgaaactacttgtccatcaaacagaatttcatttccttgagataggaccaagacatctcctatttgaacatcggaactcttgatactaacaaccgtatccccctgtactagaaatacatcgctctcttttgcaagaaggctttgttctaaatctgttgcagtttttttcaaggaccactgatctaaatgattccccaaatcaagcataaacatgatattgctagctgtcttggattggttcataaacaaggacaataaaatcgccgaacagtccaagacctccatcgttagttccttacgcgctagtgtttgataggcttctctaatatagccaaaagcctgataacaagtccatatatagcgaataggagacggtacaaaactacgaaaaagtatacgcttaatcgctgcacctgaaacaatagaataagcactctcttctctacgaatgggaagagtcatcaactcagaaactttccctttatcaattctttttaaaaaggcttctgcattatctaatacagaaaagccttcttttatgcgtagagtaaagtgctgttgatccatgtaaaactggatagactcaatccccttttcatctctcgccaaggaacgaagatagtcttgaatatccaaggtgagtgaaaaagaagatgatagtcggatatgttggtatcctctatgtagcactttaaaagacatattattcccctataaggctatctaattgctcttcttttttctcttgctcgtacaaatatttggcatcttgcaagacatcgtctccatgttgcttcacaacagaaacagatgcatctagctcgtcttttaacttataagccttagccaaagctttagaataaccttttttagcttccttacttgccaagattttcaaaccaagggtaccaaatgcgacaccacccaaaaagagtgatgattttttcgcaacttttgcgacggttaatacttcttttaacatacttatttcctccttatcattattatatagcaatttagatataaaagcaatgtcatttcataaattggagaattatactcaatgaaaatcaaagagcaaactaggaaactagccgcaggctgtacttgagtacggcaaggcgacgttgacgtggtttgaatttgattttcgaagagtattagttttatttctactgaatctcccatctacttattcctaaagttgctttcatttgcctcttttgatacacttaaactatgaatacaaatctcaaacccaaacttcagcgttttgcttctgcgactgcctttgcctgtcccatctgtcaagaaaatctgactctgctagagagtagtctcaaatgtagcaatcgccattcttttgacttggcgaaattcggctatgtcaatctagcacctcaaatcaagcaatctgctaactacgacaaggaaaattttcaaaaccgtcaacaaatcctagaagccggcttttatcaggctatcttagaggctgtatctgacttgctagccagttcagaaactagcaccacagtcttagatatcggttgcggtgaaggtttctattctcgcaaactccaagaaaggcatcctgacaaaaccttctatgcctttgatatttccaaagattccgtccaaatcgctgccaagagcgaacccaactgggcagtcaactggttcgttggtgacttggctcgtcttcctataaaagacgctagcatggatatcctgcttgatatcttttcccctgccaactatggagaatttcgtcgcgttttatccaaagacggtatcttgataaaggttattccaactaaaaatcacctcaaggaaatccgtcagaaggtacaagaccagctgacaaacaaggactattccaaccaagatatcaaaaatcatttccgagaacactttaccatcctatctagtcaaactgcctctctgactaaaactatcacagcagagcagctccaagccctactcagtatgactcctctcctctttcacattgaccagagcaagattgactggagccaactgacagagattaccattgaggctgagattctggttgggagagtactataattgacacaaaaaaccgcatttcaagaagatctgcggttttaaatttcaatttttaaactatctatcccaaaagtctaaaacatttaaagcttttagcttctccatttattttcgattcgaaataaaaaacttatcaataaatagcaagtgaaataaggcaagtgtaattcccgataagcacccatgataagagatttcttgatgggtaagggggtaaagattactattacccgccaagaggcatgttaaaataacaaatagaatccaaaataaatccgtccatttatattttgaaaaatattttttccacataagaacaccttctttcctataatcatattataatactttatgtaagcgaacacaagaaatttgaggtaatttttaagtagatttcgaggcttaaaggttgtaaaaccagcattttaagcgttcaatgtgtctatgatttctctctttttaattcaagattgactcaaatccacagcattcaaaaaaagcgaatttcaatcgaaattcgctttataggaaagtgtattagtataaatcttgtatcttatactcaatgaaaatcaaagagcaaactaggaagctagccgcaggctgtacttgagtacggcaaggcaacgctgacgtggtttgaatttgattttcgaagagtattagttcaagtgccagatatcttcgttatactgagcgattgtacggtcagatgagaagaatcctgctttagaaatgttaacgatgactttatccaaccatgcgtcacggtcttcgtagtcagccaacatttgttctttaaccttgatgtagtcttccaagtcaagaagagtcatgaaccagtctttgttgatcaattcattgtaaagacgttccaagcgctctttgtttccagctgcaagaactgcatcgctaacgatgaagtcaaccaatggtttgatagcttcacgagcgtagaattcgcttgatttgtaagctgcttttgcgtaaaggtcgataacagtttctgaatcttcaccaaagatgtagatgttttcgtcgccaaccaactcagcgatttccacgttagcaccgtccatagtaccaagtgtcaaagctccgttcaacatgaatttcatgttaccagtacctgaagcttctttagaagcaagtgagatttgttctgagatatcacatgctgggataaggaagcttgctgcagtaacgttgtagttttcaaccataactacttgcaagtgtggagctactgctggatcgttagcaataacttctgacatgcaaaggatcaagtggatgatgtcttgagcaattgtgtaggctggagctgctttaccaccaaagaagattgtgattgggcgagcagggatgttaccagctttgatatcaaggtatttgtggattacgtacaaagcgttcatttgttgacgtttgtactcgtgaagacgtttgatttggatatcaaagatagagtttgtattgatttccacaccttggtgttctttcaagtgacgagccaatttacgtttgttgtgaaccttgatgctttccaatttttctttgacagctgctttgtcttcataagacaagagtttttcaagctcatctgcttcatggtgccaaccttctccaataatctcatccaagtagtgagatagtcttgggttagcatgcatgagccaacgacggaaagtgataccgtttgttttgttgttgaatttttctgggtaaaggtcgtagaaagctttcaactcagagttcttcaagatttcagtatgaagtgccgctactccgttaacactgtatccgtagtggatatccatgtgagccatgtgaacacgtccgctctcatcgataatttgaacagctggatctttgtattctgctttcacgcgacgatccaattcttcgatgattggtaccaagtgaggaaccacttcttgcaagaattcaagaggccatttttcaagggcttcagcaaggattgtgtggttagtgtaggcagtcatgctacgaacaattgagatcgcttcgtcaagttcgataccacgagcagtcaaaagacggatcaactcaggaataaccattgatgggtgagtatcgttgatttggacaactgcgtagtcagcaaggtcatgcaagttgcttcctttttcgattgcttcgtcgatgatcaattgcgcaccgtttgaaaccatgaagtattgttggaagatacggagcaattcaccttgacggtcactatcatctgggtaaaggaaaagagtcaagttgcgagcgatatctgtcttgtcaaagttgataccgtctttaatgattgaagaatcaactgaatccaagtcaaacaaacgcaagcggttcttagtttctgtcttgtaaccaggtacatcgatatcgtaaagagttgatgtcaatgtgaagtgagcaaatggcacttggtagctacggcttgagcgaaccaaccagttttgctctgtcagccatgcgtttggaattgtttcttgttggttatttttaagaacttgttggaaaagaccgtagtggtagttaagaccaacaccgtcaccgttcaaaccaagagtagcaattgagtcgataaagcaggcagccaaacgtcccaaaccaccattaccaagagatggttccaattcaacttcttcaacttcgatcaagtctttacctgcagctgcaagttcttttttaacatcgtcgtaaagaccaaggttgatcaagttgtttgacaaaagtttaccaatcaagaactcagctgagatgtagtaaacttttttcttaccagtgttaactggcttttgactacttgcaagcttgctgtagttaagaagagccagataaagctcttcattgctacattctgcaatggttttattgtaacgattttgtacaaattcttgtagtgataacatgtttaaggtgtctcctgatattgtattatttctttaattccaccaaattttcattgattcggcgatagattgttgtcaagtcaagcaagccttcctcgacagctggtgtcaattgatcttcagtcatacgccaagaccagtttccaccaagagtagatgggaagttcatacgagctgcctcatccaattctagcaaatcttgcatagttgcaattgccatgaagctaactgatgaaaagactgtacgaagcatagcatgtggcactgtttcgtattctttacggttagtgtagcgagccatgtattcacgagtcgcatcatcgatctcgttacggtaccaaccaaggaccgtattgttatcgtgtgttcctgtgtacataactgagttagcaggtgccaagtgtgggctatcgatgctttcgtcttctgggttgaatgcaaattgaagaatcttcattcctgggaagcccgtacgttcacgcaattcgataacttcgtctgtcatgaaaccaagatcttctgcgatgatgtttaactcaccaagttcttccttaacggctgcaaaaagcttgtagccagggcctttcacccactcaccaggtgctgctgtatcagaaccagcagggatttcccagtaagattcgaagccacggaagtggtcaatacgaacgatgtcgtagattttgaagctttcacgcaagcgttcaatccaccatttgtagccgtctttgtccattgcttcccagtcatagattgggttaccccaaagctgaccagttgcagaaaattcatctggtgggcatcctgcgatgcaagtagccttaccattgacatcagtcttgaagagatgtggatttgcccacatatcgcttgaatcttccgctacgtagattggcatgtctccaacgatttcgatgtggttgtcgttagcgtaagctttcaatttcaaccattgttggaagaagaagtattgagtcacacggtggtataccaacttgtctgccaattgctcacggtagctttcaagtgctgaagctttacgagcacgagcatctgcatctggccattcagtccaagcaagattgtcaaaatgctctttgatagccatatactctgcaaagagttcaagccatgattggttgtcttgagcaaatttctcaaaatctttaacatctcctacttccaagaaacgttttaccgctttttctaaaagaggacgacgtgcatagtagattttcgcatagtcaacttcagatgcatcgctaccaaagtcaaccccttcaaggtcacttgcttgcaacaagccttgttccaccaagatatctaaatcgataaaatgagtgttccctgcaaaggctgagaaagattggtaaggagaatctccgtaactagttgttcctagtggaaggatttgccagtaacgttgttttgtgcgaaccaagaaatcaacgaagtcgtaagcacttttaccaaatgatccgattccgtatgcccctggaagagaagaaatgtgcatcaacacaccactttgacgttttttcataataagcacctcatgtgtttatagttagatattacatttttatgaacgcaaacgtttgcgctattactagtatagcttattttcttgataaatgcaagcggttttagataactttttttattattttttaaaaaatttttcttcttactcgtatatatattctttcaggaaacaaacaaaataggaataagggtttcacttatctcattaagcaaaaataaagcgagtatcctctctggtttccatttgtaaattaggcaatcgttttctcaacttttttttaaatttaaaacaaaacggatttttgggattttctactattatatgacgatgaagcgtttacttttttcacaattttttaaaaaatttttacaaaaaacacttgcaaccgctttccgattgtgctatactagtcccataaaggaaaacgtttgcgtttcctcattataaaatttgttattctttaggaggaatacactatgtcatctaaattcatgaagagcgctgctgtgcttggaactgttacacttgctagcttgcttttggtagcttgcggaagcaaaactgctgataagcctgctgattctggttcatctgaagcgaaagaactcactgtatatgtagacgagggatataagagctatattgaagaggttgctaaagcttatgaaaaagaaactggagtaaaagtcactcttaaaactggtgatgctctaggaggtcttgataaactttctcttgacaaccaatctggtaatgtccctgatgttatgatggctccatacgaccgtgtaggtagccttggttctgacggacaactttcagaagtgaaattgagcgatggtgctaaaacagacgacacaactaaatctcttgtaacagctgctaatggtaaagtttacggtgctcctgccgttatcgagtcacttgttatgtactacaacaaagacttgataaaagaagctccaaaaacttttgctgacttagaaaaccttgctaaagatagcaaatatgccttcgctggtgaagatggaaaaacttctgctttcctagctgactggacaaacttctactatgcatacggacttcttgctggtaacggcgcttacgtattcggtcaaaacggtaaggacgctaaagatatcggtcttgccaacgacggcgctatcaaaggtatagaatacgctaaatcttggtatgaaaaatggcctaaaggtatgcaagatacggaaggtgctggcaacttaatccaaactcatttccaagaaggtaaaacagctgctatcatcgacggaccttggaaagcccaagccttcaaagatgctaaagtaaactacggtgttgcgactatcccaactcttccaaacggaaaagaatatgctgcatttggtggtggtaaagcttgggtcatccctcaagccactaagaaccttgaagcttctcaaaaatttgtagacttccttgtttcaactgaacaacaaaaagtattatacgataagactaacgaaatcccagctaacactgaggctcgttcatacgctgaaggtaaaaacgatgagttgacaacagctgttatcaaacagttcaagaacgctcaaccaatgccaaacatctctcaaatgtctgcagtttgggatccagcgaaaaatatgctctttgatgctgtaagtggtaagaaagatgcgaaaacagctgctaacgacgctgtaacattgatcaaagaaacaatcaaacaaaaatttggtgaataaaaaatttgttcaaggggggtggaattcaaatccccctttgaatttatcaatagaaaacatatatagtttaggttttaattagaaaccagtatcctatgaaaggagttattatggaaaagcaacaacctagtaaagcagccctgctgtctatcattcctgggttaggacagatttacaataaacaaaaagcaaaaggttttatcttccttggtgtaacccttgtatttctcctctacttcctagcacttgcagcccctgaattgagtaatctcatcactcttggtgacaaaccaggtcgtgacaattccctctttatgctgattcgtggtgccttccatttaatctttgtagttgtttatgtactcttttatttcgcaaatatcaaagatgcacatacaactgccaaacacattaacaatggcataccagtagcacttacctttaaagaaatggtcaaaggaatctatgaaaatggcttcccttacctcttgatcattccatcttatgttgccatgacttttgcgatcatcttcccagttatcgtaaccttgatgatcgcctttaccaactacgacttccaacacttgccaccaaacaaattgttggactgggttggtttgacaaactttacgaacatctggagtttgagtaccttccgttctgccttcggtgccgttctttcttggactatcatctgggctttatctgcctcaactttacagatcgtgattggtatcttcacagctatcattgctaaccaaccatttatcaaaggaaaacgtatctttggtgttattttccttcttccttgggctgtcccagccttcatcactatcttgacattctcaaatatgtttaacgatagtgtcggagccatcaacactcaagtcttgccaatcttggctaaatttcttcctttccttgatggtgctcttattccttggaaaacagacccaacttggacaaaaattgccttgattatgatgcaaggttggcttggattcccatacatctacgttttgactttaggtatcttgcaatctattcctaacgacctttacgaagcagcttatattgacggtgccaatgcttggcaaaaattccgcaacatcactttcccaatgatcttggctgttgcagcacctactttgattagtcaatacaccttcaactttaacaacttctctatcatgtacctcttcaatggtggaggacctggtagtgtcggaggtggagctggttcaaccgatatcttgatctcatggatctaccgtttgacaacaggtacatctcctcaatactcaatggcggcagctgttaccttgattatctctatcattgtcatctcaatctctatgatcgcattcaagaaactacacgcatttgatatggaggacgtctaagatgaataactcaattaaactcaaacgtagactgactcaaacccttacttacctctacttaattggcctatcaatcgtgattatctatccacttttgattaccatcatgtcagcctttaaagcaggtaacgtcgcggcctttaaactcgatactaatatcgacctcaattttgataactttaaaggcctcttcactgaaaccttgtacggtacttggtatctcaacactttgattatcgccttaattactatggctgttcaaacaagtattatcgtacttgctggttatgcttacagccgttacaacttcttggctcgtaaacaaagtttggtcttcttcttgattatccaaatggttccaacaatggccgctttgacagccttcttcgttatggcacttatgttgaacgcccttaaccacagctggttcctcatcttcctctacgttggtggtggtatcccaatgaatgcttggctcatgaagggctacttcgatacagtgccaatgtctctagacgaatctgcaaaactagacggtgcaggacacttccgccgcttctggcaaattgttcttccacttgttcgcccaatggttgccgtacaagctctctgggccttcatgggaccttttggagactatatcctctctagtttcttgcttcgtgagaaagaatactttactgttgccgtaggtctccaaaccttcgttagcaatgtgaaaaacatgaagattgcctacttctcagcaggtgctatcctcatcgcccttccaatctgtattctcttcttcttcctacaaaagaactttgtttcaggacttacaagtggtggcgacaagggataatatatccccgccaccctttttcattttatactcttcgaaaacctcttcaaaccacgtcagcttccatctgcaacctcaaaacactgttttgagcaacctgcggctagcttcctagtttgctctttgattttcattgagtattagcgattgttactgtaagtaatatccttacaacaagcaatttttctcctagacttgaaataaagcacatttctctatataataatactcatatagaaaacaccttttagaaagatacaaatgactccatatccattttcctatttttcaagtatttggggatttcgtaagcccctgtccaaacgtttcgggctcaactggtttcagcttctctttaccagtatcttccttatcagcttatctatggtacctattgccatccaaaacagctcgcaggagacttatccgctagaaacctttatcgataatgtctatgaaccattgacagataaggttgtacaggatctctctgaacacgctacaattgttgatggcaaattaacttatactggaacatctagtcaagcgccttctattgtgatcggtccaagtcaaagcaaggaattacctaaggacttgcaactgcatttcgatacgaatgagctcgtcatcagcaaggaaagtaaagagctgacccgtatctcttaccgagcgattgagactgagagtttcaaaagtaaagacagcttgacccaagccatttctaaagactggtatcagcaaaatcgtgtctatatcagtctcttcctagttctcggtgcgagcttcctctttggtttgaatttctttattgtctctctaggagcgagtcttctcctttatatcactaagaaatcacgcctcttttcatttaggacctttaaagagtgctaccattttatcttgaactgtttaggattacctactctgattacgcttattttgggactatttggccaaaatatgacaactctcattactgtacaaaacattctttttgttctgtatctggtcactatcttttataaaacgcatttccgtgatccagattaccataaataggagatttttatgcccgttacgattaaagacgtggccaaggctgctggtgtttcgccttcaaccgtaacccgtgttattcaaaacaaatcaaccattagcgacgaaacaaaaaaacgtgttcgcaaggctatgaaggagctcaattaccaccccaacctcaacgctcgtagtttggtaagcagttatacccaagttatcggcttggtccttcctgacgactcagacgccttctatcaaaatcctttcttcccatctgtcctccgtggtatcgcccaagtcgcatctgaaaaccactatgcaattcagattgcaacaggtaaagatgaaaaagagcgccttaaagcgatctcacagatggtttacggcaaacgtgtagatggtttgatcttcctttatgccgaagaggaggatcccttggtcaagctggtcgctgatgagcagttccccttcctcatcctaggcaaatccatttcaccctttatccctcttgtagataatgacaatgtccaagctggttttgatgcaaccgaatattttatcaaaaaaggctgcaaacgaattgccttcattggaggaactaagcgactcttcgtaacgcaagaccgtttaacaggctatgagtcagcactcaaacaataccaactgcctattgacggaaatttgacctattttgcaacggagttcttagaagaaaaagggtatcagtttagccaactcctctttcagcatgacccacagattgatgctatcattacaaccgatagtctcctagctgagggggtctgtgactatatcgctaagcaccaactggatgtccctgttctcagctttgactcggtcaatcccaagctcaacttggcggcctatgttgatatcaatagcctagaacttggtcgtgtttcccttgaaactatcctccagattatcaacgatgctaaaagcaataaacaaatttgttatcgccagttgattgcccacaaaattatcgaaaaataaaaaccagctcgagctggttttttttagttactaattttctgtttcaacgaatcgtcccaaaatatgaacattctcagatacagagacaaaggcacctggatccacctgtttcataatctgtttaaattcattaaacactgcacgtgtaatgacagtgattaaaactgcctttctttcgtgattataggttccttctgcatcgtggatcatggttgctccgcggtgcaattttttatgtattttttcaattaccttgtctggatgattggtcacaatcatggcctgcatgcgtttttgcttggtaaagaccgcatctgtcacacggctagagacaaagatggtaatcatagagtagagagcgtatttccaaccaaaggtcaaacctgctatcagcatgatggtcccattgaccaagaaagaaatactaccaacattcttacctgttttcttgcgaatggtcaggctaacgatatccgttccaccactggagatattgtttcgaagagcaaaaccaatccccaagcccatgacaacacccccaaaaagggcattgataatgggatcctccgtcaaggtcgccacagggacaaactggataaagaaggaactcatggataccgtgataaaggtaaagacggtgaacttatggccaatctgataccaagccaagaccatcaaaggaaaattaatggcgtagaaggtcagcgaaatcgggatatgaaaaccaaaccagtgattactcaaggcagagataatctgtgccagacctgttgcaccactcgaatacacatgccctggttggaaaaagaaattgaccgccactgctgataaaaaaccatagaccagagaggccgaaatcttctcatcatacttttcgcgagagatactttgtaagacacgtaaaatttttatctgatgagcaaagcggcgcaaataatagcgccaccgcttaattcgttttgcttgtttcatcttcttctacttgtaagctgagttcctctagttgtttgagagctactgttgaaggagcttgtgtcattgggtcagttgccttgttgttcttaggaaaggcaatgacttcacggatattttcttctccagcaagcaacataacaaatcggtcaagcccgatagccaaaccaccatgtggtgggaaaccatagtccatggcttcaagaaggaagccaaactggtcatttgcttcttcagctgagaaaccaagagccttgaacatgcgttcttgaaggtctttttgattgatacgaaggctaccaccaccaagctcataaccgttcaagacaatatcgtaagcaatggcacgaaccttggccaaatcaccttctaattcgtgagcagtctcttcctgtggaagtgtgaatggatggtgggcactcatgtaacggccttcttcttcagaccattcaaacattggccagtcaaccacccaaaggaagttgaatttatcgttatcaatcaagccaagctctttggcaatacgtccacgaagggcaccaagagttgcattggccacttcaagcgtatccgccacaaagagaaccaagtccttatcttcaagagcaagcgctgttgtcaattctgcttggatgctagtcaagaacttggcaactggtccgtttaattctccatcaaccaccttgacccaagcaagacctttggcaccatactgtttggctacttcggtcatcttgtcgatgtctttacgtgaatagttgtccgcagctcctttgaccacaattgcttttacagcaggtgcttctgaaaagactttaaagtctacacctttgactactgctgtcaggtcctgaagcaacatgtcaaaacgggtatctggcttgtcagaaccgtaaagagccatagcatcatcatatttcatacgaggaaatggaagcgtcacttcgatgcctttagtttctttcatcacgcgcgcaatcaaaccttctgtgatatcttggatttcttgttcagtaaggaaagacgtttccaagtcaacctgggtaaactcaggctggcggtcaccacgcaagtcctcgtcacggaaacatttaacgatttgatagtaacggtcaaaaccagcattcatcaagagctgtttcgtgatttgtggactttgaggaagcgcgtaaaaatgccctttattaacacgagacggcaccaagtagtcacgcgccccttcaggagttgacttagaaaggaatggtgtctccacgtcaataaactccaactcatccaagtagttgcggatagagtgggtcaccttggcacgaagtttaagattttccaacatttctggacgacgaaggtcaaggtaacggtaacgcaaacgtgtatcgtcattggcctcaatgccatccttaatctcaaatggggttgttttagctgtattcagtactgtcagagctgtcacgtttagctcgactgcaccagttggcaacttatcattggcttgctcacgcgcagcgacctgtccagtcacctcgataacaaattcgctacgaaggctttcagctgttgccatgacctctgcagatactttttcagggttgataaccaactgcataattccttcacggtcacgaagatcgataaagatcaaaccaccaaggtcacgacgacggccaacccatcctttcaaggttatttcttgtccgatgtgttcctcacgaacacgaccagcatacatactacgtttcattgtttctctcctcttttattctgttactattttaccataaaagcgcaggctcttcatgaaaatcatcagaaaagtttgccagtctttaaaaatcaagtgaagactctaaaaattgacgcccatacaaaaatccgatgaagttcatcggactcttttattttgaattgttgcctgctttacgcttttcagcaatttcggctgcctttcgaggcaagacaatttccgttgtgtaagctgtcccaaagcgcaagacacctgcaataggggcaaagacgactgctagatagttatagaagaaatcgcccttaaaggcataagctagcgctccaatgatgaaaaatagaacaactgcctgaatcactgctaataaaattactcgtttcatgtgacctcctgactctattatagcatgagaatcatcaaaaagccgactaaattatttaaagcgtgaagagaaatactgtagaccagaccttttctgctaatataagccaagcccaagctaaaaccaagactagcataaactaaaaattgttgcacatctcctgggaaatgaatcaaggcaaacagaacactagttaccagaagaaaaattagagtttgtttactattgtcctgcttaggaaagaggtagcgtgctaacatccctctaaagataagttcttccgtcaaaggagcaaaaataacgaccgcaaagaaggagaagagtggctgagccaaggtcaagtctgtcgccatttgttgatttaccgaaggatcatctggcaagaaaaactggacaagcagagataagaaccaaaccagagcaggaagccaaataaatcggttgaagccactcttctcaatatgaacaggacctttctgataccatttataaatgacgtacacatatactccagccaaggccacataaagcaaggtagtagcatagggtgaagcgcctagattcaaagcttctacagccccactctgaacggtaccatagataaacacaaaggatagaatggctagaagaaaccagccaaggtttttaagtagtttcatagataactcctatttgaaatagcgttttaccataggtaactgcatcacattgatataaatatggattgctcctacaagcaagaagcccagtagttgaatctctcctgtcaataaagaaaagagatcgatcagaaagtagagacctggcaagacatagttatttaattggaataaaatccgaaaactctgttccaaattagccttgcgctccccttcatcgtaagaatcgaaatagtccaagacatcctttggcgtagagaaaaatgccaaatcaaactgacgaacaatcgcaatggtcttaaaaagatatttttgaacattgaaaaccaacactaatagcaaaaaagaaagagataaggttagaaagcttccatttagtataatcacttcacttcctgcaatgaagagagccaataaaattgctacgtttgcaatattaaaagcaatggttccaaactcaagatcacgatacatttgcacataataggtctcattcagatcatcatccatttcctcttgatacaaggagtgaaattttctgcttttctttaagaaattgaacgtcaaaagaatgctaatgaaacctatcagtaaacaaatagctgatatccatggtaccaagacttttacatctaacataattccgtgggattcggcacgtgctttaaacatccctacaaacatgcccaagaaagctcccaagacaacagacattaaaaataacaatccatgcttctttttcatattcattctccttattcacttgctaaatttttggatttcttttcaatccagtcgattactggtatgagggcaaaataggcccaaataaattggtcactctgatagggactaaaccagcctaagtctatcccaatcaatagaaatatgctgactaatagagctgcgacaactacataataaaccactttatacttgttcatcactcgtcctcctccaagcgaaataccgattcgactgtttcgttgaaaatttgagatattttcagggcaatgataatggacggggtgtattcatcccgttctaatagactaatggtctgtctggaaactcctgccagcttagctagttcggtttgattgaaaccatcgcgagctcgcagctcttttagacggttttttagttgcatgttacacacctactctccgtcaaattcaacggcttggatatcctcaatacgttgcaacttgaatttttctttcccatttttatcgacatgacgtagtttgacccattcctcatcaacatccacaacttcccataaagatgttccaaacacttgtccaacgattgttggatttttcccaaattaattcttgcaataatcttgacatatctatatttcctttctcttttctttcgattacctttaacctcttctctaaccgcttgatttttttagattgactactataaatcaagacgagaaaagggaaaaaaatccatacccacatgtggctccctcctatttctttatttcttaacttgaatttattgtaacacatctttttctttttgacaagcatatttgtcaaaaagtttatgatttttgtcattttgcaaaagaaaaaggtcaggattaggttcctgaccagtttatctatcattaaaatcctagtttttcaaagatttctgagaagttttggctgattgtctcaagtgacacttgcacttcttctcgagtttggttgttcttgaccgttacttgtccgctttcgacttcactctctcctagggtgatgagggtcttagccgcaaagacatcagctgacttgaactgagctttgagcttacggttgaggtaatcacgctctgctttgaatccttgttggcgaagagcctgtaccaattccaaggccttgacatttgctccatcacccaagactgcgatatagacatctagggcgttttcgatagggagagccacaccttgcttttcaagaatgagaagcaggcgctctacaccaagtccaaaaccaaatccagcagtttcagggcctccaaagtaagaaaccaaaccatcgtagcgaccacccgcacagactgtcaagtcattgccctcaatctcagtaatgaactcgaaaatggtgtggttgtagtagtccagaccacgcaccatattggtatcgatgatatagtctactccaagattttccaacatctgacgcacagcatcaaagtgtgcttggctttcttcatcaaggaagtctaagatagaaggcgcattctcgactgctaccttgtcttctttctccttagagtccaagacacgaagaggattttcctccaagcgacgctggctatccttagacaaggtctccttgagcggtgtcaaatagtcaatcaaggcttgacggtaggccgcacggctctcaggatttccaagagtgttaaggtgcaatttgacaccttggatgccgatttctttcaagaaatgggctgccatcgcgatggtttccacatcggtagctggattactagagccaaagcactcgacaccaatctggtggaactggcgcaaacgtcctgcctgtggacgctcatagcggaacataggtcccatgtagtagaacttacttggcttttgcacttctggggcgaagagtttattttccacataggaacggacaactggcgcagttccttctggacggagggtgatatgacggtcacccttatcataaaagtcatacatttccttagttacgatatccgttgtatctccgacagagcgactgataacctcgtaatgctcaaaaatgggcgtgcgcacttctgcgtagttgtagcgcttgaaaatctcacgggcaaagccctcaacatactgccacttggcagactcagcaggtaaaatatcctgcgttccttttggtttttgtaatttcatagggaatcctctttaaacttaatagtcttattttaccataaatagagggattaaaacagtgagaaaaaaattaggatttagatatcatttttgagattaataactgtcaaaagaatagctagcaaggaaagaccaacaaatagcatccaagtcaactgtatattccatacagctacaagtgaaaaacaggctgttcccacaggtatggataaggtaaacaataaacctaaaaaattactggtacgagctagaacttctggagctagatttttcataagcatggcactaatctttggttgaactttaccagacacatacagagttgaaaagagaaatagtaaaccaagtacgacttgattgaataaattagctagaccaactagactgagtcctacggtcacccacatcatcaatctaggcaaggactgcttcccaaaataatcattgcccgtaaggctactgatgatgattgctaacaaagcacagacttgactgataaataatgcctctgtgtaagaaaagtccaaaagagaatggctcaaaaagaagatgttatagatgcttcctaaagcgccacccaaggcattgataagcaagacagcaaagatcatgaatccaaagtttttctgtccacctttaagaaaaacgagacgtaaatttcggtaaattgttaggaactggtctttgatagaaagcttctcattttttagaattttaccatcagcagatgacattgacaggctcaatttgctttttcctaaaaagaggataacggctgatactaggaaaaaacaggcattgattcccgcaacgagagaaaaattattgaccgatagccctaagagccagactccgaaagcttgaccaccaatagctgaaatataggtgatgaactgggaaaaagaataagcctccatcagatcatcttcagctactttttccttaataagaggcatgcgcaagccacctgcaaaatcactgataacatcactaatgacattgattaaacacaggctagaaaaggcaaataaactagcttgctgaacaactagggctgccagaaaaaataaaaccgcctgaaacaaaccgctgtaagtcatccatttgaccttgtccctcgtgtaatctgcccgaatccctacaaaaactgtaaagaaagtcggaagaatcatgacaatattcgccatagcaaccgcaaaagaggcttgtggcagggtcgatgcatagacgataaataccaggttaaaaattgaagcaccaaaggcattgaagaagcgtgacaaagtcaagagtcgataagcttgatttctaaacaatagtttcataggtaatctcccttcttgttcaaatact

SEQ ID NO: 72 - DNA, 124845 bp, Streptococcus mitis NCTC 12261 contig18
tgatactcaatgaaratcaagagcaaactaggaagctagccgcaggttgctcaaaacattgttttgaggttgcagatagaagctgacacggtttgaagagattttcgaagagtataagtaggctgaaaaggctccagccacagcatggactattataacacattcaggaaagagaaaaaagtctgctgattgtaatcagacagactccattttattccatagtatcaaaggcaagacttggtttggcattgaggtccaagtttgcaaaattttctttgttccactcgctgacgctggcataggcaatcattcctgcattgtctccacaaagacgcagtggtgggatgatgaccttgacatctgtgatttcggccgctaggcgttctctgagacctttattggctgccacgccacctgccacaaccagggttttaacagggtattttcccaaggccttcttggtttttgccataagaatatccaagacagctgcttgaaaggaagcacacaaatcctctgtggacaagctttctcccttttgctcggcattgtggtgaagattgataaaggccgatttcaaacctgagaatgaaaactccagattatcttccttaatcatggcacgagggaaatcataaatatcctgtccctgatgagctagctcgtcaatctcacgaccagcaggataggtcaaacccatgacacggccaaccttatcataggcctcaccaaccgcgtcatctcgcgtttccccaacaatcttgtagtcaccagcctccgaaacataaaccaactctgtgtgcccaccgctaaccaagagggctagcaagggaaactccaaaggctccacactctgagcggccatgaggtggccagccatgtggttaacgggaatcagcggaagcccatgtgcccaagcaaaagccttggcagctgacaaaccaactagtaaggctccgaccaagcccggtccataggtaaccgccacagctgttacgtcctcttcggtaattcctgcttctgctagagcctcctcgatacaggctgtaatgacctcgacatggtgacgactagctacttctggcactacgcccccaaaacgtttgtggctctcgatttgactagcaatgacattggacaagagctggtcgtctttttttaagacagcgacactggtctcatcacaggatgtctcaaatgctaaaatatatctatccttcatctatttctctcttcatgatgatggcgtcctcgactgggtcatggtagtaggcctttcgctcagcgatgactgccatcttttctttcttgtaaaatgcttgcgctctttgatttgactttctaacttcgagaaaaatctccttgtctgtcggcaattgagcaaacaaggtcgaggcaatcccctgaccctgataggctcctttaacagcgatttgcaggacttctgcctcaaagatattttcctgcacagctagaaagccaatcacttctgccccatcataagccagagcataccaagtctggtcttgggacaggtctgcttggatttgttccagagtccaaggactgactgggtaaacagttaccatgacagcgtagatggcttgagccaagtcaggctgttgttggattcgtttgatttctatcataggcgtttaatgtaagactcgccagactcggtgtgattcttgagccagttttcctcagcctcaacacgtttgaggtagttcggcacaaaatcatgcaaggagtctgcttccttgtcccaagccaaaagagcaagattagctgcatttggcagggtttctttgtaattagtccttggcaagtgttcttgaatctgctccacaaagggggcaacttctccgacaaaggtaacctgactagcccccttgattaactcaatcactcgctcaaagggtaagtgcgcttctggcatgacagacttagcattttcataaaatcctgcataaacattgttgcgacgcgcatccatcaaaggaacgaacaaaccttcttgttggtagggcaccaaagccaagaggctagacataccaaccaactcaatgttcagagtatgagcaagtgtcttagcagttgctaccgcaattcgcaaacctgtgtagctacctggcccttccgccaccacgattcggtccaaatccttgggcgtccaatccaaacttgccatcaaaaaatcaatggctggcatgagggtaatactgtgatttttcttgatattaatcgtcgtctcggcaagaacctgcttgtcctctaaaatagcgagagaaagagccttgctggacgtatcaaaagctaatactttcataacacattcctatctttttgtctgcttactattatactacaaaagctggcacatgggaattttctttatccccaaacaaaaatgccccagcatgagcagggcatctaagcatttaatccaaagtaaaatacaaaccaaacgacataggttacaaggaggagaaaaagcgagtagagagtcacaaaggtaatcttccacaagaacttggtttgtcgttgttccagtttggcaaatagaagattccccgcataaacgcaagcaacaaaaacaataaaagctaccaagcgagctccgatagcaaaagcaaataagttatacatagggcaacctccttgacttaaaatctatatggaattatgacaaacaataaaactcatttccattatcaaaataacatattttctttatttttgcaaacgtttactaaagaaatcgtcctgtgactttctcgtttccgtcttttactaatttttcattttgtggtataattgaaataattgtaacgaatcaaggtcaatctagacacaaaatggaatgaaattaagcaaatttatgctaaaagtttggaataagctgacctgtaaatagaaaggaactatatgatttacaaagttttttatcaagaaacaaaagaacgtagcccacgccgtgaaacaacacgcgcactatacctagacatcgatgctaactcagaacttgagggccgtatcgctgctcgccaacttgtcgaagaaaatcgcccagagtacaatatcgagtatatcgaactcttgtctgacaaattgctagattacgaaaaagaaactggcgccttcgaaattacggagttctaatatggcctacactcttaaacctgaagaagtcggcgtttttgccatcggtggtctgggagaaatcgggaaaaacacttacgggattgaataccaagacgagattatcatcgtcgatgctgggattaaattcccagaagatgacttgctgggtatcgactatgtcattcctgactactcatacatcgtggacaatatcgaccgcgtcaaggctgtcttaatcacacacggacacgaagaccacatcggtgggattccattcctgctcaaacaagcaaatgtccctatctatgctggaccgcttgccttagctttaatccgtgggaaactcgaagaacacggcctcttacgcaacgccaaactttacgaaatcaaccataatactgagttgacctttaaaaatctcaaggcaactttctttagaacgactcactctattccagagcctttgggaattgtcattcatactcctcaaggaaaaatcgtctgtacgggtgactttaagttcgacttcactccagttggagaacctgcggacttgcaccgtatggctgcccttggtgaagaaggtgttctctgtctcctgtctgactcaacaaatgcagaagtgccaacctttaccaactctgaaaaagtcgttggccagtccatcatgaagattatccaaggcattgaaggacgtattatctttgcatcctttgcttcaaatatcttccgtctccaacaagcaacagaagctgctgttaagactggacgtaagattgcggtctttggtcgttctatggaaaaggccattgtcaacggaatcgagcttggctacatcaaagctcctaagggaacctttatcgagccaaatgaaatcaaagactaccctgcaggcgaggttctgattctctgtacaggtagtcagggtgaaccgatggcggccctctctcgtatcgccaacggaacccaccgtcaggtgcaactccaacccggcgataccgttatcttctcttctagtccaatccctggaaacactactagcgtcaacaagctgattaacatcatttcagaagctggtgtcgaagttatccacggtaaggttaacaatatccatacatctggacacggtggccagcaagagcaaaaactcatgctccgcttgattaagccaaaatacttcatgcctgtccacggtgaataccgcatgcaaaaagtccacgctggactagcggtggatactggtgttgagaaggacaatatctttatcatgagcaatggtgatgtgcttgctcttactgctgactcagctcgtatagcaggtcatttcaacgcccaagacatctatgtagatggaaatcgtatcggtgaaatcggtgctgctgtcctcaaagatcgtcgcgatctatctgaagacggtgtcgttctggcagtcgcaactgttgacttcaaatcgcagatgattctgtctggtccagacatcctcagccgaggctttgtctacatgagagagtctggcgacttgattcgccaaagccagcgtatcctcttcaatgccattcgtatcgcactgaaaaacaaggatgctagcgtgcaatcagtcaatggtgccattgtcaacgctattcgccccttcctttatgaaaatacagaacgtgaaccgatcatcatccctatgatcctcacaccagatgaagaataaagcaagaaaacagccccgtcttcggagctgtttttttctatgctttcttttcttgatttttagaaatactacgatttttaccttccagatacaccatcaaaatagaaatgtctgctgggtttactcccgagatacggctggcttggccgatggtttctggattgataagtttgaacttctgacgggcttcggttgcgatagaatcaatgtcatcccagtcgatattggctggaatgcgcttttcttccatgcgtttcatcttggcaacctggtccatggctttggaaatatagccttcgtacttgatttctgtttcaatcaattcgataatcttgtcatccaagtcctctgctgctggtccgatgaaggccaccacatcttggtaagacacttctggacggcgaaggaattccttggctgtcactgcatcggtcaacggcttgaatcccatctcctcaaccttagcattggtttccttgactggcttgagtttgatactgtctaggcgcttcatctcattgtcaaattgatttttcttgatttcaaaacgagcccaacgttcatcatccacaagcccaatctcacgtcccatctcagtcaaacgcatatcagcattgtcatgacgaagaatgagacggtactcggcacgactagtcaaaaggcgataaggctcaatggttcctttggtcaccaagtcatcaatcatgaccccgatataaccgtcactgcgcttcaaaatcaattcaggcttgccttggattttcagagccgcattaatacccgcgataatcccttggccagcagcttcttcataacctgacgttccatttgtctgaccagcagtgaaaagacctgagattttcttggtttccagagttgcacgcaactgatgaggcaagaccatatcatactcaatggcataacctgtccgcatcatctctgcattttccaaacctttgatggaatgaaccaagtcacgctggacatcctcaggcagactggttgaaagtccttgaacatagacttcctctgtattgcgcccttctggctcaaggaagagctggtgacgttccttgtccgcaaagcgtacaatcttgtcctcaatcgacggacagtaacgaggtcccactcccttgaccacacctgtaaacataggcgcacggtggaggttgttttgaataatctcatgactggtaccattggtataggtcaaccagcatggcacctgatctttgacataatcctcatcacgtgaagtatatgagaaatgattaggcgcttcgtctcctggctgaatctctgtcacatcgtagttgattgaagaagccttgacacgtggaggggttcctgtcttgaaccgaccgatttctaggcccaattccttgagattatcagcaaggttaatagaagctaggctgtggttaggacctgatgagtacttgagatctccgatgataatttccccacggagggcggtccctgtcgtcacgataacagccttggcagcatactcttgatgggtcgctgtacgaacaccgacaactttgccgtcttcaaccaaaatctcatcaatcatagtctgacgaagggtcagattttcttgattttcaaccgtcttgcgcatttccttagagtaaagctccttgtcagcctgcgcacggagggcacggacagctggccccttccctgtgttgagcatcttcatctggatgtaagtcttgtcaatggttttggccatctcgccaccgagggcatcaacttcacgcacaacaatccctttggcagaaccaccgatagagggattgcaaggcatgaaagccagcatttcaatgttgatagtcgcaagcaaaaccttacaacccatacggctagcagctaaggaagcctcgaccccagcgtgtcccgcaccaattacaataatatcgtattcttctgtaaaattatatgtcatttcttaacctttcaaaaatttctcgtaaataaggaactaacttctcctcctctagagcttgagccatagtaacccatttaaagtgcgtatgctcttcaggatctaatctgataattggcttctccccaacccactctgctttataaactaatcgagtaaagacagtatccttagaagtatccagttgactatcttcgtgaagaagtttgagcaaactgctatctagcctaactcccgcttcttcaatacattctctaagagctccatctcgcggaagttcacccttttcaaccccgccaccaggaatatcccagtaagttggataaacattgggttgtcctcttttaatttccgaacgctgaatgagcaaataatcatctccactatgaacaagtacatgggcaataagcttaaccatccttttctctcctatttctcaagatgaatgtgtcttagttggccgtcccaagttggtagggctgtttttaaaaaggctggaactagctggatattctggagttcatccaagtcaatccactcacaaggctgcattttttcgtcttcctgcatggtcaatggggcatcctcaagcaagttcaccagataatgaaactcgatgttgtgataggaaacaccgtcttgttcaaaacgattttcaaccacaaaagctagctgcccagcttgagctttaacacccagttcttccctcacttcacggactactgcgtcttccgtactttcattgacttggatggcaccgccaatagtgtaatacttgcccttatctttggtgactagaagcttgctattttggagaatcaaggctgtcgcccgaacaccaaaaactgtatttcctacttttatcctaaagtcttgctgagtcattttttcctttcccttaaacgacacaaaaacagtcaaaactccaaagaagtgcaggacaaaaaagcctgcaacatccatgagctttgaccatcatttctattgcttttattattgtagcaaattgagaaaatttgtcaatctaaatgtactgacaaacttgtccatcgcggtaggcattgtcaatcaaaccaccacctagacactcttccccgtcgtaaaagacaactgcctgacctggtgtgatggcgcgttgcggttctgcaaagataacctctgccttgtctcctttgacatggacggtcaccttagaatcaggctgacggtagcggaatttagccgtacattcgagcgtaaactcctctggcatgtcacgagtaaagtgaacttgactagcctcaaggctggttgacatgagcgaatcatggtagaaaccttgtccgacatagagaatattcttgcttagatcttttccgacaacgaaccacggcgcgttgtcaccaccgtgttgaccaccgataccgagacctccacgctgaccgattgtataatacataagtcctgcatgctcgcccatatcgcgactatctacagtcatcatgcgaccaggctgagctggcaggtagttgctgaggaaatttttaaagttcttttctccaataaagcaaatccctgttgagtctttcttcttagcagtcgcaaggcctgcttcttctgctagttttcgaacttcaggcttttccaaatgtcctagtgggaacatggttttttggagttgttcttgcgacagttggctgaggaaataggtctgatccttgccattatccacaccgcgaagcatgtgaacagtgccatcctcatcacgcgccactcgggcataatgcccagtcgctacatagtctgcccccaaggtcatggcatagtccaaaaaggccttgaacttgatttccttgttgcacataacatctggatttggcgtgcgtcctgcacggtattccgctaggaaatactcaaaaacgctgtcccagtactctttttcaaaattgacagagtagtaaggaatgccgatctggtctgctaccgcagccacatccttgtaatcttcggtcgccgtacagacgccgttttcatctgtgtcgtcccagttcttcatgaagataccgatcacatcgtagccctgctccttgagaagaagagctgtcaccgacgaatcaacaccaccactcatccctacgacaacacgtgttttagagttctcactcatggtaagtctcccatctattcgtttattcacgattgaaggtcgtgtgtgcttaacgattgaaggtcgcttgagcagtattcattataacatgcttggttggagaagacaagaaagaggatgtcaatcgaccaacctctttgtaaatacatatataattgtttaaaaagagggtaatttatagcttaatccctctactgcttattatcttatttataaaataaactaaaaatgatatactatattgaggaggaatacgtacatgatcccttaaagatactaccatccatgtacgtagaacgattgtgaaaaactacaaagatattctaaaatcaaaaaataccatttttactattatcattgtcgcaagtattggacttttaattggtctagtcattcaccaagaaaacatcttaacagaaagaggcaatattgctttcttcaaacggcaaaaaaatgaacaagatgtcgaacaagtaaaaaaagccatcaaagattttaatatcgattctgaaacaattatagaagattggaaaagaattcaagaattgaagccaaacactgacgaaggcaagcaaacattagcagactttcttactactacgtccgataaaatcaccaatcattatagcgaaaaagctttaaaaatggatataaaggaatccgatagtcagtttgaagataaacaaacacttgaaacagccatcacttccttacaaaaaatactagaaatcattaaaagtgttaactccacaagcgaacaagccactattgatgaaaaaataaaacccatccaagaactaatttctaaattccaaaagcaagttgaagtcttgaccaaaaaagaaggacaaaagactgacaaaaaagaaacaggaacgactagtagcgagggggaaagagaaacctattcttcaggaggagggagctacactccaacctatactgagtcaaatgggagcagatacagttcacaagcgcctgcaagcgaaccaccttcatctaatagtgctggcagcagcggaaatgatgtggcaagtacacaaaatcaagcagctaatacttcagaagctcaagcagaaactaataccaatagtaacaatgctgaagttcccacaataaacagtgatgatctcgctagtttaggtggcggagttacatcattcggtcagcagtaagcaatcggctatcactaatttaattgtcttttatcgaacaaagtatataaaagtctaacaaaaactaacttctaaataaaaccacacagtcattccaatattgaacataatcaaattgaaagggatactgtgtggtttttgaattgttgaacattcagagattccatttttggggcaattgtctatcaaaatgtccttttatctgtcaataatcctaaaaaatcttgtcgtttcaagtcggagaaatgtttggcggaaagacttcccttttgaagtccatcatctctgacctgcaaataatagctatgttggcttgttttaatcgtcaaaaagtctccaaatacaaaagctcttttccagttgcgaatctcaaattcttttatctctgatttgggaatacggataagtccttgtcgcaaatcacgatgatgctcacttgtgaaagtcatcccatttccaagatttcttatcagcagttcatctggagttaccatcaccagcgctattttagttaagaaaatttcaactgttggtggtaaaatcgccaaatcaaaccaaggatgtaggtagcgataggctaagaaataatgaggctcctcacccaatcctagttgtttatacaaggtcttgacttcactatctaacctcgcttcaaaagacacatccgaatgctcttcttccttcctctgattaacataacgcatccagactaggaaacctataaagactaggacaaatattcctgataaaagatattttaaattgtagttcatcgcttaacctcctgattcacacctctgcctaaaacagaagcctatttattttgaaaataggtccatcataactttaaataagacgggtgtcattaaaattaggataattcctatcacaaatatcatgactactcgaaaaagttccttatttttaaacatttttccaccccttttctagctacatcatagtactcattaaccccatattaaaattacaccaaacttattttagctttcttttttactttttatattactatgatacaatatttttaataggattttattgtttgttaacttttttcactaaaaggagaaaatcatgcgttatgattttggaaaggtctataaagaaatacgtgagtcaaaaggattaacccaagaagaggtctgcggagatgtcctatcaagaaccagcctatcaaagattgaaagtggtaaggcaactcctaaatatgaaaatatggattttcttcttcggcaaatgaatatgagttttgaagaatttgactacatctgccatctctatcagccgagccaacggacagaaatcatgcaaacttatctcaatatgaattccatcattggtggcagtggtctagttcatttttttgaaacatgccaaaactatctcaagacccatcacgacctgcctatagaagaaatcagggatatgctggaagttgtcattcatattcgccaacatggtacagagcaactgtcagaccaagtgaaacagactatcaaaaaactttgggaaaaaattgaaaaacaagatacatggtatgaaagcgacctaaaaatcctcaataccatccttttcaactttcccattgaacacctccatctcatcactgaaaaaatcttgcaacgcttagaagactataaaaactatcaacatttatatgacttgcgaatgacaatcctactcaacatttccaccatttacttataccatcaagacaaaaacatgtgtcaacaaatctgctatactttactagaggatgccaagaataagaaaagctacgatatgcttgctatctgctatgtccgtattgggatttgtagggatgatgccaaacttatccaaaaaggattctcccttctagagctgaccgatgaaacttccattctagcctttctcaaaaaagaagtggagatctattatcaaccgaaagaaatataaaaagtcgagggatttcctcgactttttcaaattattctgttcgttatttcttaataccagccgttgttaagccagaagtttttagcagctgaccatgaaccgtaacgtcctgcaacgtaagcatctgctacacgttcttggttttcagctgagtagtcaccgttcaagtatgaatctgtcaattggtaacgtccaatgtattggccgtttgtagctgtatagctaccacctgattctttttgtgcaatccattctttagcttctgcttcagatccacttacagttgcagctggtgctgaagtttctgctgcagcaacagtttcttctgctacaggagcgcttgcagctggtgctgcttcttctactacttctgtagtttctgctactggagctgaaacagtttcatcttgagctgctggtgccgcataagtagctggcgctggtgttgcagcaggcgctacagggccatcgataaccaactcttgaccaacataaatcaaatgaacgttgtcgatgtggttgttttctgccaatttctcaacagttgtgttgtgagtttcagcgatttctgaaagtgtatcaccttctttaacagtgtaagttgatgattcttgagcagatacaaatgatggagcaaatactgcaaacaaggcagctactcctgcaagagttgttttaatctttttagttgttgatttcatatttgaaaattctccttctttctatagttctatcataccctttaaatattaccgtttcttgacacttttatgtagaaatattacaaaattattttttatttctctaaataagccattttttgttacaaaagatgcttttttatgctatttgtagtgtaaaaaggttttcatccacaattaaagccaagaccttcattctttgatataatagagataagaatttttataaggggaaactgatgaaatcacttcgttttcaatctgtctttgatatcatcggaccagttatgattggcccatctagtagccatacagctggtgctgttcgtattgggaagattgtctcttccatttttgatgatactccgacagaagtcgaattccaactatttaactcatttgccaagacctatcgtggtcacggaacagacctagcccttgttgcaggtattttgggcatggatacagatgatcctgaaatcccaaacagcctggaaattgcccacaagcgtggcatcaagattgtctggaccattcagaaagacagcaatgcccctcacccaaacaccactaaaattaccgtcaaaaatgctcataagaccattagcgtgactggtatttctatcgggggaggaaatattcaggtaactgaactcaatggctttgccgtctctctcaatatgaatacaccgactatcatcattgttcatcaagatattccaggtatgattgccctcgtaacagaggccctttcccgctatggtatcaatatcgctcagatgaatgttactcgtgaaaaagctggtgaaaaagctattatgattatcgaagttgacagtcgcaactgtgatgaggccatcgaagaaattcgaaaaatccctcatctccacaatgtcaatttctttaaataggaggaagcatgttttattctatcaaagaattggtcgagcaagcagatctggactttcaaggaaatgtcgcagaactcatgattacaacagagtttgaattgaccggtcgcgaacgtgaagaagtcttccttctcatggaacgcaatctagaagtcatgaaagcctctgtccaacttggcctcaatgaaaataaatctcgtagtggcctgacaggtggagatgctgccaaattggatcactacatcaaaaacggaaaaactctgtcagattacacgattctctctgctgcccgaaatgccattgcagtcaatgaacacaatgccaaaatgggcttggtttgtgccactccgaccgcaggaagtgctggctgtctgccttccgttctaacagctgctattgaaaaattagacctcagccacgagcaacagctggatttcctctttgctgccggtgcctttggactagtcatcgcaaacaatgcctctatctcaggtgctgaaggtggctgtcaggccgaggttggttcggcctctgctatgagtgctgcagccttgactctagctgccggtggaacaccttatcaggccagtcaagccattgcctttgtcattaaaaatatgctaggcctcatctgtgaccctgttgccggcttggtcgaagttccctgtgtcaaacgcaatgccatgggagctagctttgccttcatcgcagcagacatggccctggcaggtatcgaatctaaaatccctgtggatgaagttatcgatgccatgtaccaagtaggagcaagcatgccaactgcctttcgtgaaacagctgaaggtggactcgctgccacccctactggtcgtcgcctccaaaaagaaattttcggagaataagcttatcaaataggagaaaccatgacctctatctcagctatctttttcgatctggacggaaccctcgttgatagttctatcgggattcacaatgcctttacccatacctttaaggagctgggggtacctagccctgatgccaaaactattcgtggttttatgggaccgcctcttgaaagtagttttgcgacctgccttcccaaagaacaaatttctgaagccgtgcagatataccgttcgtactataaggagaaaggcatccatgaagctcagctcttccctcatattgtaggcttgcttgagaagttatcgagcaattaccctctttatatcaccactacaaagaatactccaaccgctcaagacatgactaaaaacttgggaatctatcatttctttgatggcatttatggttccagccccgaagcaccccataaggcagatgtcatacgccaagccttgcagacacatcaactagcaccggaacaagccatcatcatcggagataccaagtttgatatgcttggagctcaagaaacaggcattcagaaattggccgtcacttggggatttggagagcaagcagatctactaaactatcagcctgattatatcgcccacaaacccatagaagttttgaggtattttcaataacatatacatacgacaaggcgacgttaacgtggtttgaaaagattttcgaagagtataagtctctacataacaaaacgcatattaccaaggtttttctattcctgataatatgcgttttttgattgtaaatattttttattcaacgtgggtagtttgattggcaaaggcgataatagcttgcttcaactcatctccactaagagtgcggaactcttcaattttttgatcgattgcttctagaggcatgacattaactttaccaacgaaaatcttatccataacttgattatcaacaagttcggttgataccaagagttcttcgtagagtttttcgcctgggcggattccaacttcaacaattggaatttcgctttcggtgtgtccacttagaaggaccattttcttggccaagtcataaatcttgactggtttgcccatatcaaggataaagacttctccatccttggcataagcaccagcatggataaccaaacggctagcttctggaatagtcataaagtaacgggtcatgcggaagtctgtcaccgttacaggcccaccttcagcaatctggcgttcaaagactggaatgacactaccacggctaccaagtacattcccaaaacgaactgcacagtaggttgattggctacgttggttgaaaccagtgacaatcaactcagccactcgcttggttgctcccataacatttggtggattaaccgccttatctgtcgaaatcataaccatcttaggtactttggcttcatcaacagccttagcaacgttgtaggttccacggatattgtttttgaaggcttcttttggattgcgctccatcataggaacgtgcttgtgggctgccgcatgataaacaatagctggcttgtacttttcaaagacttgcaagagacgatcatagtcttgaatgtccgcaatcacaggaacataatcaatcccttggaacttacgaatcaattcatgataaacaaggtaaattgagttttccccatgaccgagcaagacgatgcgttcaggattgaagcgactaacttggcgacagatttcagaacctattgagccaccagcacctgtaaccaagatggtcttacctgtcagttctgcgcccagacgcgattcgtcaagacgaatttcctgacgacccaaaaggtccgtaatatcaattttttggaagccagtacctgcttggtgaagtccctgaacaacggtttcaaccttaggcatcttgtaacatttgacacccagcttattacacatctgcaagatacgttcatattctgacgggtcaagcgacggaatcgcaacgataacacgctcgatttgatggcgtttggctaattcaggcagatcatcatatgaacccaaaacaggaattccaccaagtttttggccctttttcttagaatccttatccaaaataccgacaagttctaattcactagttggatgttggtaactatccataaagagagctccaccatcaccggcaccaatcaagaaagtccgacggtgttctccatcaccacttccctttttgcgtttagagtagattaactgccaagtaatccgtggcaataaaattaagaaagtactcaacaagataaagagcacgataaaacggatggagaagagaggcaagaaggcatagcagatactatatgacaagatactgctagcagtcacaccaaaaaagattttcatgaaatccgtaatcttactgtaacgactgatactagcgttcaatccccaaaatccaatcatcaattgatagaacaggaaggccaaactcgtgtagatgatgtagtcaacaggtgctggattaatcaatccgtagaataagatataagatacaatgatggaaaccaccatactcaaaatatcaaatattccccagaaaacctgtttttgttgtttatttaaaatttccaccagatcaatcacataatctgtgagttttttattcatagaaatttactcctccttaaaagagctggatgattatactcaatgaaaatcaaagagcaaactaggaaactagccgcaggctgtacttgagtacggcaaggcgacgttgacgcggtttgaatttgattttcgaagagcattatattgttattataacactttttctaaagtttatgatttgctacaatcttttacttgctttttcgtaacagtttcataaaaataaactgtcggacaaatccgggacaaagggcaaccaccatctgaatggcaacactcttggcatactccatgtaagaaatttgtcctcgcttcagcatgcgttgacgagcttgacgatagagtttgaggtaacgcagtcccccacgacgctcaaacattcctgctccaacacgaaccttacacaagatttgatccagatttccagtcttagctcctgcagcaatcatattgagccagaggaggtcatcctccatataaagcccatcctcatagttgcctgccttgagaaccatgtccttcttgaacatgacagtcatgtggttaaaggcacttctcatcctttgataagctacaatatctgcatgctgggttggaacacgacggtaagaaacaatctcatcaggattgtcaataaactctgcaatatgtccacctaataggtcgaggttttccttctccattagctgaacctgtttctcaaaacggtctggaacagctatatcatccgtatccatacgagcgatgatatcgtactgacactgcaaaacaccctgtcgaagagccagacccaaaccttgattatgctcaagaggatagcgtttcactggaatatcagactcagcttcaagctggtctaatacctgatagagctcaggtgtcaaaggcccatcctcaaccagaaccaattcgctcggtttcagggtctgattttgaacactctcaatagcatcctttaaaaatgtcggattttccttgatatagaccgatatcaatacgctgattttttgcttttcagacacagtttttctccaatgtatagatttccttccactattttatcataattttcaagactttcccatttttatcttgaaagcccaaaaccttacttgacattataaggaaaaaaccttaaaataagctgttattaaaatcagctagaagaggtagtatatgaaaaagcaatcactcttttttgttccaggtattatactaattggtgtttccttgcggactccttttactgttttacccattattttgggagatatttcgcaaggactgggagtagaagttagttcgcttggtgtcttgaccagccttcctctcctcatgtttaccctcttctcgctattttctacccgactggctcaaaaaatcggcttggagcatctcttcacctacagccttttcttcttgaccataggttctctcattcgactaatcaatctgcccctgctctatctaggaaccttgatggttggggcaagtatcgcagtcatcaatgtgctgcttcctagtcttatccaagccaatcaaccaaagaaaattggttttctgactaccttatatgtaacctctatgggggttgcgacggctctggcctcctatctggctgtgcctattacacaagccagttcttggaaaggacttatcatcctcctcaccctgctctgccttgcaacttttttggtctggctacctaatcaccgctataatcacagactggctccacaaaccaaacaaaaaagcaaagcaaaggtcatgcgtaataaacaggtctgggcagttattgtctttgcaggttttcaatccttgctcttttacaccgctatgacctggctacctaccatggccatccatgcaggcctatccagtcacgaagctggcttgctgacttctatcttctctctgattagcattcctttttcaatgaccatcccaagcctgacaaccagcttgtctactcgcaaccgtcagctcatgctcgctctggtttcactagctggtgtggtcggcatttccatgctcttcttcccaatcaataatttcttttactggcttgccatccatctcctcatcggaaccgcaaccagcgccctcttcccctatctcatggtcaacttttcactcaagacaagcgcccctgaaaagactgcccaattgtctggtttatctcaaacaggaggctatatcctagcagcctttgggccaaccctctttggttacagttttgaccttttccactcttgggtgccagctgtagctgccctcttactcgtcgatatcctgatgactgtggccctctttacagtggacagagctgataaaatcctttaaacttctagttttggctagaagttttttatatataaaaattttacacatttctcttgacagggctttcatttagatgtacaatgtatgtgtagaaaaattatatataaaaatcttacacattagaaaaggaggtttcccatgtactttccaacatcctctgccttgattgaatttctcatcttggccgtactggagcaggatgattcttatggttatgagattagccagaccattaagcttatcgctaacatcaaagaatctacgctctatcccattctcaaaaaattggaaggcaatagctttctgacaacctattctagagagttccaaggtcgcatgcgcaaatactactccttgacaaatggtggtatagaacagctcgtgaccctgaaagatgaatgggcactctatacagacaccattaatggcatcatagaagggagtatccgccatgacaagaactgaatacctgactcagctagaactctatctcaaaaaactgcctcaggctgaccaaattgaagccatggactatttcagggaactctttgacgatgctggagtcgaaggagaagaagaactcatcgctagcttaggaactcctaaggaagcagctcacgaagttctctccaatcttctcgataaaaaaatcaatgaagcacccgatcaaaagaataaccgacaaattttgcatatcgccttgttagctctccttgcagcccccatcggtattcctctgggaatcgccatcctcgtgtccctgttcgcaatctttgtggcagccttgactgtcattctggctttctttgcagtttccatacttggtatcatcggcggattcctatttttagttgaaagtttcactgtcttagcccaagctaaatcagcctttatcttgatttttggtgctggtttactggctatcggtgcttcttcgctagtcttactaggtatttcctatgtagcccgcttcttcggcctactcattgttcgcctggtgcaatttgttctcaaaaaaggaaagagaggtgaccagcatgcgtaaatggacaaaaggatttctcatttttggtgtagtgactaccgttatcggatttatcctgctctttgtaggcatccaatctgacgggatcaagagcctacttgccatgtccaaggaacctgtctatgatagtcggatggaagagctgacctttggtaaggaagtcgaaaacctagagatcactctccaccaacacgcgctgaccatcacagactctttggatgatcaaatccacatttcttatcatccatcactctctgctcaccatgatcttgttacgaatcaaaacgataaaacgctgagcctcactgataagaaactgtctgaaactccatttctctcttctggaattggcgggattctccatatcgcaagtagctactctcgtcgttttgaagaagttattctacaagttccaaaaggaagaactctaaaaggaatcaacgtgtcagccaatcgtggacaaaccaccatcataaatgctagccttgaaaatgcaactctcaatacaaatggttatctcctccgaattgaaggaagtcgtatcaaaaacagtaaactcacaacccctaatatcgtcaatatctttgatacagaccttacagatagtcagctagagtcaacagagaagcacttccacgctgaaaatatccaagtacacggtaaggtggaattggtggcgaaaacagacctacaactgctactttccgaagaagaaaaacaaagaatcaacttagatctttcaacaaaacatggttctattcttcattttttaagagaaggaaggcgttcgtttaacaacgaagaaaacaaagctgaacgattaagcaatccttataaaacagaaaaagcagatgcaaaagatcaactcatcgcaagggcagaacaggatatctatctactcaaatcagaggaacacgagtcttcttctagaaatcgttgacaaaagcgcttacatctgctactatggaagcatatttatctaactaaaaaggaggttctaccatgaaacaagaatggtttgaaagtaatgattttgtaaaaacaacaagcaagaacaaacctgaagagcaagatcaagaggttgcagacaagactgaagaaacgatagccgacctcgatacaccaattgaaaaaaatactcaagtagaggaggaagtctctcaagctgaagtcaaactggaaagccagcaaaaagagacaattgaaacgcctgaagacagtgaagcaagaacagaaatagaagaaaagaaagcattagattctactgaagaagagcaagatctttctaaagaaacagaaaaagtcactatagctgaagagagtcaagaagcacttcctcagcaaaaaccaaccacgaaagagccccttcttatcagtcaatccttagaaagtccctatatccccgaccaagctccaaaatctacggatagatggaaagagcaagcgcttgatttttggtcttggctagtggaagtaatcaaatctcctacaagcagtcttgaaacaagtagcacacacagttacacagcctttcttttgctcattctgttttctgcatcttcctttttctttagtatctaccacatcaaacatgcttactatggacatatagcaactatgcataatcacttccctgaacaatttgcttcattaaatctcttttcgattatctctatcctagtagcaacaacactcttcttcttttcattcctcttgggtagtttcgtcgtgagacgatttatccaccaggaaaaagactggacgctagaaaaggttctccaacaatatagtcaactcttggcaattccaatcttcctcactgccattgctagtttctttgccttctttgacagcctacgatttacagccctcttgtgtgtgattagcattggaatcattctgcttgccagtctccatatcattacaagaccaagtcaatcaagtgaaaccgactccttctatcaattattcttgtctgtccttgtgaacggagttattatcctcctcttctttgtagctgaagtggcactgattggggattatcttcgtatcttgacctttctttaaacttcatactcttcgaaaatctcttcaaaccacgtcagcttcgccttaccgtatgtatggttactgacttcgtcagtttcatctacaacctcaaaacagtgttttgagcagcctgcggctagcttcctagtttgctctttgattttcattgagtagcaatcctgtctttcatggcaggattttttctatgtcaaaaaagcaagtcgattgacctgcttctactttacttttcttgtgctaatgttttaaaatcttgtcctaggatgggttgcacttctaattgattggcatctagttggtggtaagatgctgatggtagtgactctaggaattttgcatagttcaagcgggcaatggcttcatagtcttctggtttagagccgtctcctgtaatttgaaccaagtcaatctcccactgaacttccttatccagcaattgctcaatataggaagcaggaacaaatggttctatcggcaaaacagtcttgacgccttgagccagatggtaaacgccatgcacttttccttctccatcctgatagaaggaaactcttgcaaagtaggcatccgtctcttgaaccgcacgcacacgcgcttcaaactgtaccaagccgtcttcctctaaaaagcttttcaaatcctcatggctaaagaaaacaggataaaaaattcctgggcaaatcgtaaaacgagctgcagtgtctgctagatgggcttgaatacttgcttggaaataagcttcaaaatcaaaaccatctagtccttcaatctcagttcctgtataagcaagtagggcttctaaaaatgctttgataatctgccagtctgtcttcgttagtaggtcaggaagatcaatacggtaagccttgtgatcatcagcatagctaactttaaagagaaattgtgattgtcccactatcgcacactcgatatactcaagacggctaagaggttgacggagatagactgcatcatagctatgtgactccaaaccatctagcaaggccaagatcgacttggcagtcaaaatctcttgttctcctaaaatgctctgtttatttggaataaaaaatgttttcgtcataactggactcctttgaaatcgtttacatatagtataccctattttcctgaaagatacagaaacaaactttagattttttagtaaaaagcatagaaaaacagcccctaaggactgttcaatcttatacagtagctgcttgatccaagctttcaccgatagcggctaggcgctcgacaacttcagcttgtgtcaattcattttctgaaacatagcggttacgtgggtgaacacggcactcgtgtgagcatccacgaaggtacttgtcttcattttcttctgatgtcaagatacgacggttacagaatggatttccacagtttacataacgttcacatggtgttccatcaaaccagtctttccctacgatggttgggttgacatggttgacatcgactgcgatacgctcgtcaaagacgtacattttcccatcccaaagctcaccttggacttctgggtctttaccgtaagttgcgattcctccgtgcaattggccgacatctttgtagccttcacggaccatccagcctgagaatttctcacagcgaaccccacctgtacagtaaaccacgacacgcttgtccatgaatttttccttgttatcacggacccattgtggcaactcacggaagttgcggatatctgggcgaatagccccacggaagtgtcctaggtcgtactcataatcgttacgtgtgtcaaggacaactgtatcttcgtcaagaagggcttctttgaactcttttggagacaagtaggcacctgttgtttcaagtgggttgatgtcgttgtcaaagtcgttgtcttccaaaccaaggtggacaatttcttttttgtagcgaacgaacatcttcttgaaggcttgttcactttcttcgtcaatcttaaaccagaggtcttccatgcctgggaggctgtgaacgtagtccatgtatttttgagttgtttcgtagtcacctgaaactgttccgttaattccctcgtcagcgactaggatacggcctttaaggccgattgatttacagaaagccaagtgatctgcagcaaattgctctgcattttcaattggagtataaaggtagtaaagtaagacacgaatatcttttgccataagatttgttctcttttctattcttaaattttcagaatttttcatctaactatactagtatacctgcttgagaaaacgaatgcaatttatttgactggaaattgtagaaaggtgcttatccctgcacttcatcagtaaccatagcgaatagcagataattctctcaattttttgatctgctcggattgactttctgataacatcagcttattgtcaatcaacacacgtgagatgtcaacattcatttgactcaaaataaatggagtagaggtcccatcgtcctctaatcgtcttttataactcactaacagatttttcaaaggagcaagttgaggcgtattgcttataccttccagtaggtgatctatgatagtcatcgcttcacaacgtctttcgcttcctccagcaaaccattttaatggtgtcattctcattttcctccttaaattgaaaagctatcattcctaactctcgtaccaatatttcacccaaataccctgtgtaaaaaagtcagcaaaaatggtaatgttgcgaaaatattattaatcacatgcaccgcataggatggataaatgctcttggtatagcgggtcaaactagcaaagatgatgccagatgttgcaaagacgaagatatctaacagactaggcagactcaaaaaatgaggaagagcaaacaaaatggaaggaagaagcaaatcaaggccaaatcgcgaatgcttaaagaaggcgtgttgaagtaatcccctataaatcaactcttccataagtggagtcagaaagaacaaagttatatagatacctagctcagcaaagttggtcccactataaccgatcaatacggcccaaccttcagcagttgactgaacatgtttagctgtctgaacgttaaaagagatctggagcactaccactaatactgtcaaaatcgaataccaaagccatttttttcttggaatgtgaaagagataaccatgacctgtcttaaccagaatccaaatcatgactccgctaaatagcaaactcaagagattttgaatccagacgaaattgccaatctgggaagaaaattgccaataattttgaacaataagcgtcagctgagaaagaccaaatacgaaaaataagtaagagaaaactgcacttattttgaagacaagctgatactttttcatgtgaaccctcctttgtaaacttggaacatctctaatataagccataatttcctaaatccttactccaaatcctaaatggtacttaagatttcctgaatggttaaatagtgataagaaaacacggatatctatgctttcgtttcaaaaaatcactgcctcccccagatagacctgaggaaaacagtgattcaatttttaggaattaggaatgaatacacgaaatcaattgatcttatgattttttgtttttcaagaattcatcgtattgtttttgcatttcgttcaatactttatcgtaagcaccttcagatttcaatttttccatcaattctggaatagctttgtctgggtctacagtaccagtgttgatagctgtatcgaattgttgcattgtgttagagattgctgaaatttcagatttcacattgtcagtgttaaagataaatccaagtgctggagattctttagcttcagccaattgtttcttagaatcttcgatttgttggtctgtaacgttttcgttgatgtaaaggatccagttgttaccagtgttccatccacccatgtgagtgtttcctttgtagccatcaaggactttaacacggttttctttacctggaattttttcccagttcttgccttctggaccataaacaagaccattcaagagttctgggttagtgttcaagaggttcaacacttccattgatttttctttgttcttagagttgtttgagatgacaaagttagcaacttgtgttgtttggtttttcttgatgaagttagtgattggtttgatttggatatctttgttcgcaacacgtgaaagcaagctgttaccgtagtcagctggtcctactgtttcttcacgaacgaaccaagtatcttgttgaaggtcaaatgaagtatcgcttgttgctacgtcttttggaatgtatccagcttcatagaatttgtgaagagtcttcaagtgttctttaaagcgaggcacttcgtaacggtttacgatcttagtagtgtccccttcaaggtcgataacgaatggaagtccgtttggaactgggtagtcaaagttatcagatgggatgaagttcttagtaaccgcaaatggcactacatctggagctttttctttgatttgtttcaagactggttcaagtgtttcatatgaagtgacacctgaaatatcgataccgtatttagcaagaagagttccgttgaaagcgaagttttgagatgatgcaacgttggctgcaactggaactgcgtaaattttaccgttaatgctgttacctttgatgtaagctgggtcaagtgctttataaagctctgccccttctttcttatacaagtcagtcaagtcagcataggcacctttttgagcatttacaacatagttagatgcaaaggcgatatcgtagttttcaccagatgatgtgataactgacattttcttatcatagtcaccccatccaagatattggatatccaatttagcaccaactttttcaccgatgattttgttagcattttctagcaattcatctaagttatctggtttgtcaccgatttggtacattttgataacagttttttcacctgaagctgagtcagcagcttttttactgttacctgaaaggtttccacaagcagcgagaccagcagccaaagcgactacgctagcagatgcaaaagcatattttttccagtttttcatgacaaaaactcctttttttatttttaaacttataaacaatgtaatgatcttaacttcacgcaagggaagtttggaaatgagaaatgatttttctcgacaagtactattctttcacaccaccgatagtcaaaccttttacaaagtagcgttggaagaatggatacaaaatcgcgattggaagggttgcgaccacaaccatggccatacgacctgtttcttttggaagagcaactcccagttgaccagataggccgactgctttggcgatgtaatccatattttgttggatttgcatgagcaaatattgcaatggatacaagttgtcactcttgatgtaaagaagggcattgaaccagtcattccagaaaccaagagctgtcaagagcgtgatggttgcaatacctggtagtgacaatggcaaacagatttggaagaagatccgggcctcactagcaccatcaatacgagcggattctagaatagcttctggaatggtcttcttgaagaaggaacgcatcaagatgatgttaaatggtgagagaagcattggaacaatcaaagcccaaactgtatcaccaagttgaagtaaacgagttaccacgatatagcccggtaccaaaccagcattgaacaacatactaagaagggcaaagattgtaaagaatctgcgatacttaaaggttgtccgtgagatagcgtaggcataggttgttgtgataaaaacgtttgtgatcgtccccaccactgttacaaagactgagatgaagagggcttggagaattttatccttaaactgtgccaaaaactcaaaaccgtctaatccaaattgggatgggaagaagctatatccattttggaggatactcttttcatctgtcaccgaaataacgataacgaatacaaagggtaggatacaagagagggcaaccaaaccagaaatggtactgaagaagatatctgctttcttactgaaggagtgaatgccgacattatcaattttttcttttttaattttcttttctgccatattctcctcctttctagaacaaggctgagtttggatcaactcgtcttgcaagtaagtttgataggataaccagaatcaagccgacaactgattgataaagacctgccgctgatgccatcccgatatctgctgtctgagtcaagccattatatacatatacgtccaagacattggttacgttatagagctgaccagcattgtgggggatttggtagaaaagaccgaagtctgcacgaaagatatttccgactgcaaggatggtcaatacagttaccaatggtgtcaactgcggaatggttacattgcgaattcgttgccatttgctggctccgtccactgtcgctgcttcgtagtaggttggatcaattcccatgattgtcgcatagtacatgacactgctatatccaaaacctttccaaatacctaggaaaagtaggagatatggccagatgcccaagtcagcgtagaaattgatttccttcatcccaatagattctaggaaatggttgaatacccctttatcaatgtttaggaaggcatctgtaaagaaactgatgataacccaagacaagaagtaagggaacaacatagaagtttggaaaatcttaaccattctcttagaacggagttcactgaggatgatggcaatccctactgatacaatcaagccaatgaagataaagccgagattgtagaggacagtatttcgtgtgataataaaggcgtcttttgaactaaacaagaatctgaaattatcgagtccgacccatttactattcacgatactatctataaaaccattactggtcatgtggtagtctttaaaggcaaccacgttcccaaatactggaatgtagaagaatagaatcaaccagagtgcccctggtaaaaccatcaagagaaagatccagttgtctctcaaggtttttgaaaacttattcataatttcctcccttttttattttgatatccatctaaaaattcctttttagatttttgataacgattacattattagtatactcctatttgaaggttaggttaaactactaattatagaaaaaactccacaaattattttatgtggagtacttttttaagaaagggatgtttcacgagaaacactctgcccaaggcacggtgttcttgtttcttatgtcgtgtagatggttgaagctgtcgcaatggtatgccactggttggctgttgtggctgcgaagtccttgtctgcgtaaaagtcagtaaatggcagaatttccacttctagctcatcgatacggtccagctgacctgccagataagcctcgatgcggctttctgctcgtttaatgcgttgcaagagtcctcccatacggatgtcaactgtatccaagccaaagaccttgttttccttcaaccattgatggctaaagagggcatggaagtcttcaattcggcttctgagttctggtaattcttgtctggcaatttcttgcagactttctttatcgtttgtttggtaggcctgacggatgcgtcttcccacatccactttgctacttaaaatggaattcaactgggcctgagtttcaaagagataggaatagttcccagctttttctttaatgttagcgagcatctcagcagcctgagcgaagtgcagtttgtcctgttcaggtgtcatgtgctggtcaaggatcggacagagaacatcctgataaaagacatagcggttgggattgatgccactgagattgcctggtagatctggcaagaggttagcaaggtcaatctgcatgaaatcctcaactgataggcctgtattggtctggaaatgagcagacaaacggtctaggtcattgcggtagcagagttctgcccagatttgcaagcttgggagaatagaaaactgggcagtttcaccaccattatccccccaaccagttacgatgacttctttgatatcattagcacgacaggctttattggcttcaagagcgatgagacggctgaaatggttattgggtgtgaaaccaatccacttccaagctccccctgcaaaggcgatatcttggctaatcttgtggtgattacggaagttgcgattgtatttttcctcactatcctgataatagtcccagtaaaccaaggtcacacgatctttgagacggtctaggtagacacgcgtttcctctggaatttccacatcacggtcgtactggccatctgttgacataagtttaaagaacatatcgctccacatctggcagtggaaaccatatttgtcagcaatatccagcacgcgctccaagtgttggcacatgaggagactacgatccacaacaccgttcagaatcaagtagcgtcccaaaccaaccaagtgggcttcgtccatcccgatattgaccttgcgagtttgtagtttagacagagtagcaaacataccatcaatcaggtcataaaccttttcttcgccgataagaaggatatcctctacatcacggagctcctggacttctttaacaccccatttgacaaaggctgacaagtgggccaaagtctggatacatggcacaaaagtcatatcaaactgctgggcataggcttcgatttcctgtaactccttagcagaataagccccgcggaaatagccaaagtaaggttgtccttcaatctggtaggtgtcttccatgtaaagctcaaaggttgagtagcccatgagagccaagacctcaatcatctgcttggcagcagccacattcagcaccgcatttctcgaacagtctgccatgtaggctaaatcttcataagccgcctgttcctcaatctctactttatcaccttctgctagagctgttaccaacaaggacaaggcacgataaagttggtgaggtttactgtaggtcaattgatagtgaccatcctcacccttgatagagatagaggcttggtcagactgagcgacagctacctctacatctggtagcgaaatgtgctttttaagcaactctactgcttgctcttgttttggactaagtcctgtaaatcttaccattggttttcctcctgtagccagttgacaagggctccgtagagattagcatctgcatgataggtgcaggcttggataactggtgcgaccgtgtattcttcgtaggtctcgacaaagttatcaacagccttcttgacaccttggatgaaatctgtgttttggctgatagagccacccagactaatgacatctgggtcaataagatactgaatattaagcaagccttgcgccagattacggttcattcgctcaatagcttcttgacaaagggtatttccttctgcggcctcttggtaaatcttgcgaccgtcccagtcagtctgaccagatttttcaatcacgtagcgtaccatatttccagttgacgctaattgcgaccagttgttgagcttttcagcaggggcaagggttgtcatgtagccaaattccccacccaggccgtggcgacctcgatgaagtctaccattgataatcatggctccgccaatccctgtcccaatcacgacacaggctgcattttcaagctctggatgagctagtagttcactgagtccaacgcagttggcatcattttctagatggacaggaatctgataagagctaagcgcctcataccaagaaaatccgtgaatgtagggcaccgcactgaagccatcaatcacacctgtctcttgattgaccgcgcctggaacgctcatagcaatcccactgtaatcctgctctgacaagcgctgatctagccaagctagtaagtcctccaagttttctggtgttgggatacttgtcttatatagtattttcccatcaggagtcagactggcaaacttaattccagttcctccgatatcaatcgttgcaatggtcattgtttttaccataaaaaggggcgaatcagcagttagttcttaccttttcgcccctcctttctttttatgtttactttttgaaattaaatttcttcttttttgatgaattctgtacgaatctcttgtggtgaaatgaggcctctatgaactggatatggtcgttcaagtaggtcaaggaagagatgttgactttccggtacacgtacattttcactacacatattatagtaacgaagaacatagccttcttcattttcagctaccttaaaggctgttggacagatttgcggtatgctgataacagaatggctcaataggctaccagtcgcagccacgcttccttcttgtttagcaagctgaaggctagtaaatggtgtctgcaaggccttagcacgacggaaagctgagaagcgttcttggacttggtggcattcaagcgcaaactcgacttcaaactcacgcaagcattgtgcttctggtgttgggaagtaaccccagtcacctagctcacctgatgcacgcaaaatagtcactgcaatggtgtcgtctccaaggatttcgtattcattcaatcccttgttggatacagtcacccctttttcatcgtcatacagactgacaaaggcttgttggtgttgaggattttcaggattttcccatgaagcagctggtttgtttggtcgtgttaccacctcatagatgctttcagaatcattgcttggacgcgtgttatgagtcttgaccaagagacggatacggtggtctttggcagtgttagtaaagcgagtcttgcaacggatttgtggattatcaacgaagatagtcatctcagtttcaagaggaatgcttgtcaattcttctgaacgtccagcttcacgcttcataaactcgatgatgcctttttgctcttcttctagcttttcatctgcactgacaggcacggtcaattcatgtttgagcaaaatcttagcgtagcgagctgtgttttccaagacctcgtagcccttaagctctgcatagattggctctgttccttttggttggaaatagatatactcgtttccgatgtcaccacggtcttcgaagcggataaaatcttcataggcttcgtgagttgtcttgtcatagactgtgatattgtcatccacacttaccgttacaaatggcgtatcaatcactccgttttggtaaataccgtcgcggtgttcttgctctccttccagcaattggaatgttgtccaagaaagtggcgctaggtgaactgggatgatcacgcgcacttgtcgagcaatacgagcttggcggaacttatcttttggtaaatcgtactcaaaattagctccgagatcttcgattttagcctctacaggacgcccatccaagtcctccacacggtaacttggcaaggtaagagcagccatcttcttgtatccttctgttggatgcaactccttgaaatcacaagtcgctacatcaatcactgtgctgacagtatcaaccttatcatgcaagcctgtgttaatgacagtaaagagatagtcactttgagccttagctgtagctattttgcccttccactcgttaagaaggttagtcttgacaaagtttccgacttgattgaccttggcaaaacgtgtctccatctcacggtgaacttcgtccacgctacagccacagatactatcatgcggcgcattttgcaaaagagttttccatgcataagtcaactggtccttgtggttgtggcccccagtgataatagtcagtggttctacaatttgctctaggaggttgctattttcttggaaggcttgtttgagataaatacgagatgaagaagtgttggcaagtgtgtaccagccgtctgtttcctgactggtcaactcacctgtaaccgttgataattgctctggtagggcactttccacggcttggacatattcatcaaaagaactatgaacaaaggttacatctgggaagagttcatttgccacacgaatggcttcgctcagatttttctgtacaggctggtgatcacatccgttcatcatcaaccattggttggtcgaagcataatcacgcacatctgacaatttttgtttccagaaggtcaaggcctcatctttatcaactggaatttcattcccgttactgtaccagttggcaaagaggataccgaggacacgacttccgtccgcaccctgccagtacatttctgaaaactgggaagtaaactgctcatcttcgagaacttggttgtcaaatccaatcggcttcacaccacgaccaaaggctgccacgtgaatgcctgatttttgaagaatttgaggcgcttgtcccatatttccaaaggtatctgggaagtaaccaatctgagttgatttgccccattttgcagcctcctgctgaccgataagagtattacggacattggcttcacttgaaatcaagtagtcatcttgcaagatgtaaaaaggaccaattttaaatttgccttcgtcaatatatcgttggactttgtcgcgattctcagggcgaatctccaagtagtcatcaaggacaatggtttgaccatccaagtggaagctcttgaactcagggtcattttcaaagagatcgaagagattgtcaaataattccaccaactgcatacggtggctttcaaaaggcaagtaccactcacggtcccagtgactatgtgagataatatgtacaacaacattttccatgaagtaaaacctcattctaaatttaaatttttattgttaacgttttaaatgtaaatttgtgattcttttcaagaatcagttacgctaaagcgtgttccttagcggatatccaagtaatccaagaccaattcacagaacatcatgttggcccaagagaaccattcacgagaataaagagttgggtcatccacgtggaagctttcgtgcataacacctgtaccaccatcgcaagcaaccagctgatccagcaagaattttttctctgccttatctctcgttgtcaaaccttggatagaaagggcgattggccagatatagcgatagaaggtatgagaacttccgagtccactagcacattctccttggtagaaatatggattttcagggctcaaaatggtacgacgagttgcttgatagacttcgtcgtcaatatcgcagtagcccagataaggcgcagccaacaaacttggtacgtttggatcatccatgatgctggcatttcctagaccatccacttcaaaggcataaatcttttcgcccttgctgttgcttgtgtaggcgtagttttcgatgccttcttggatttcagactggaggcgcttagcgtctgtgataacactctggctatcagctagatttaatgctgcgaagatctcttgcacataacccaagactactacagcaaacatatttgacggaatcaagtaactatactgacagcagtcatcactcggacgaaaggctgaccaggtcattcctgtcactgcaaaatcaggtccaaagccatcatttaccagtgtatcttccttacggtccgtatcgcggacaaaacgataaggagagttattatggtcttgttctaccgtccagagatggaggatttccttagtcgctgcgacaaaagtctcatcaaactgactagtctcgccagtctctttccagaggagataagccaactgcaaaggatagcaaagcgagtccacctcgtacttgcgttcccaaatccagccattcaggtctgtgtggtcggtctcgtggtgtcccttccagttttcctcaatgttgaaggaattggcataaggatccttgagtaccaaggtcatctgacgtttgaccaaacctgcaatggtctgacgcaggagggcatcccttttagccacatgcaggtagggtctgagttgggctgtcgaatcccgaagccacatggcaggaatatccccagtcaagacaaaagttgaaccatcttctagaatttcaaccgtattgtccaaggtatctgtgtagcaacgctcgaaaacatccacccactctggatggtccttagcccgctctgctacttcatctagccactctctaacaatttcttttgaataaatcatcgtgcagtatcctctttcaaacaagtttcattttcagtatatagcttttgagacagaaaatacatacacaaatgatagtcatttttctacaaaatagttatctttgaaactccttttctataggttatatttttctgatataatgtagaaaaacagctaaaggaaagactatgaaaccactacttgaaaccatcgatacccgctttggaactgccagcaagcatgccttttctcggggaaataccctgccatacacaggcgtgcctttcgggatgaattactttgtaccccagaccagtgaccaggagggctcttggtttttcgatccgcatctgcctatctttcaggggattcgactaacccaccagcccagtccttggattggggactactcttggctccttctgacacctgtcacagggcagataggtggagacagcctcttctatcgtcagtcttcctatgatatggataaggcctctttccaacctcattatctgaaaattttctccctgcgctatcagattgaaagccagctcacaccgacttgctacggtacttctattcttttagagcaaaaacaaggcaaagccctctccctctaccttcacgcagcagatgaactgacagtagaacaagtagataagcgaactcttgccctgcgacaagaaggtaaaactgaaaccaacaaaaatccactaactatgttcactgccctgcaaatgaatacggatattcttgctatcatccaagaaggcgaagactggcgaattgacttagcagatagccatgctgagattcagctagcgacttctttcatctctccttctcaagcactgcttaatctacctcaagaagattttgataactgtaaagcaaatgcgcaagcggattgggaaaatctcctccatcgttttgacattatagagacaggagaagctgaccgaaccttctttgaccactgcctttacagactcttcctctttcctcagactttttatgaggttgatgaatcaggacaagccatccacatagatttggctactggaactgtcaagcctggtgtcctcttcagcaacaatggtttctgggataccttccgcaccaccttccccctctttgcccttatcataccggaacactaccaccgctttttagaaggtttcctcaatagctaccgcgatactggttttcttccaaaatggctggctccagatgaacggggtatgatgccaggtacacttttagacggtattatcgccgatagcgcctgcaaggacatggcccccgacctagaagaactcctccaagccatgcttgaaacagccagcaaggccgaccctctcggcatcaatggtcgtcacggactagcccaataccaagaactaggctacctctctaccgatcaccacgaaagtgtcagtcacacccttgactatgcctatagcgacttttgtatcgccagctgtgctgaaaaactagggaaaatagaaatcgctgaaacctacaaggccgcatcacaaaattaccgccatctatttgacgctgagacaggttacatgcgagcgcgtgatagtcaaggcaactttcgccctgacttctctccttatagttggggacgcgactatgccgaatgctctgccatccaagcaactttaggcgtcctccacgatatcccaggcttgatccagcttatgggtggaaaaggagcctttagcaactatcttttaaaagcctgtcaggaggctcccctctttgagacaacaggctatggctacgagattcacgaaatgagcgaaatggctactgctccttttgggcaactcgccatttctaaccaacctagcttccacattccttatctcttccgctacagcaactaccctgactacactgcccttcttatcaagaccttacgtcagaaagcctttcacccaagctggcaagcctatcctggcgatgaagacaatggtagtctctctgcctggtacatctggtcggctctcggattctatccaacctgtccaggcaagcccagctatgatctcggagtccctctctttgaccatctccgagtctatctcgctaaagaagataaatggctagatattcatactgagcaaaaccacagccacttcaactttgtcaaagaatgccgactggacacaactctagtatcaactattcaacatcaagacctcttaaaagctgaacaactaaccttcaccctcagctggttaccaagtcactagctagtagacaaaagaacctttgtatcgtgcaaaggctcttttattttatgaaacttgtacttgaagttgatccagaagctgaccacccaccgttaggttcagatagaaatccaaggttttatctcctgcaaaatacaaggttggaagcgtcaatcttttttcagtctcgccaacttgaaactcaataacttgaatctcgtcctgataggcgacaccatggacacctgtccctggttgaatcgaaatcttagcctctaaaggagtattactttcgctacgttcaatcctaaaatgaagagtctctccctttgtcacagctagacttttttctgcaaatgctagcccctgaacaacttctgtttttgataagctaggagttttatagagtgaaatctttgtcaatacaggtaaatcctgtgactctgtaatcatcacgcgcaccttctgtgcctctactagcgaacctcgcaagaggcgcttataaccaactgtaaagcctgtaccaaattcttgccagacaccgtccacctctacttgcacataaaaaccagcaattcgttgccctagcttcaaatcctctcttaactcaattacatcaaaagttttaggtgaccctaagtcgagttctaactggattggcaagcctgcatcgcttgcccaagagctggtcttaaggccatctgtcaaatagtgacaggcaaagtctgcggaaagagcagaaccagataccttagctcccagagccaaatcttctttatagagctcattgcgataggccgcaaattcatagaggcgttcaatatcctttgcatcaaatagcccagcttgattcggcggaatattaagtaggagcggggttcctctccccactgagtgaaaatagatttcgaccaactcctcaagagacttagaatcctggtcctcatggtaaaaccaacctggccggatggaaacatctgcctctccgattgaaaaaatcgtacctgagggatctccatgctgaagatagtccagctctgcttctgttcctagtttgtcagaattcaccttttgccacagtggatcacctgcataccctcgttcattgccaatccagcggatactggtgccttctgttgaaaaaatcaagcaatctccctgtagctcacgaatggtttcaaaccatttctcaaattcataattgaccttttgagcgccctctcctctagcaccatccatccatacctctgcaaatttcccttcatttccataggcaggatttgataaaatctcctttagctgagccagataataggcattatagtccgcttctcgctccacatgatagagaggactgtgggcatcccaaggcgataggtagacccccatatccatatcaaactccgtggcagcttgggatacttcaaggagcaaatctccctctccattcctccaaggactggccttgaccgaataatctgtgtgagctgtcggataaaggacaaaaccatcgtggtgcttgaccaccaaaatcaacttcttaaaacccgtttccttgagcacgcgaacccactcccgcgcatctaaccttgtcggattaaatcgttcaggatcctcctgacctgtcccccattcctggtcataaaaggtattgggcccaaaatggataaaggctgctagttcatcccctaaatacgctagctggtcctgactaggcaaggggccatgcggttttatttctcttaccatactacttcctatctacacttttcttcacttttttgtcatgcacttgcaattctgttaacgctagagggcttgccaagccttcaaatcgaagacgaagggcataggtctccaccttgtcaaattcaaaacgaagctcttcatccttgtcgcttgaaactttttggatagctgatacagggcgccaattctcctcttgcttgagcagagaatccttatccaaatgatttggagtccgaggcaaggcaggctcattccctacataataatcgatatgggtaggatccaccgccacgtattcttgattttcgacataatacaaggtcacgttatccacaaatcgcggttttaaaatccctgcatctccaaacagaataccgacgctagcttgctctgacttggcaatccaagtattggctgtcgatttcttccgagcaatgaccttatcattgaggtaagatgctgaatgattaggctctgagtgagaagcaaagaccagaggcagattggaccctgtccactgattggaaatgacttcaccatctacactggcatctgtcacatgaatggtgactgttgctggtaactcacagcccgctacttgtcctgtgagcacactttctcctacctgagcatagacttgaggttcaagttcatcccaagtcaccttggccgtatctcttctgccatctgataagactagcttgactcggtctggtaagtgtggggcttccttgacaagcgtccaaaccctttcaggctcaatagcgcaaatcccttgaacacaaacctgagcagaagcctttaaatccaaaccctctagctggccagataccgtaaactcatgaaagcttgccatatcttcttcggagattgcctcccaaacaaccttgactcgttttgcactaccagactcatagtccaccaaaactgaagatggcagctgtggataagttcccttagctgtatacaagcgaagtggtcgtacaaaaactgcctgccctagcgaggtattttctgcgacctgcaggtgcatttgataggtcttcccttgataaatggcgcggatagccaagtcacctgcagacaagcaatgaagcactccctgcttgataatggcgtgggcactaccactcgtctcccaaatcacttcactattccccaccttgttcacagggttatccacagtttgtggataaagtccaatggctggggaatctccttcttgcaagcctgcctgcttgtccactcgaatctcaaacaagcgttgatttttcactggctggcaagcaaaagcctctcccactaagaaattaaaacttgctggctctagccctctggcactggcctttactcttacttggcctgcctgctccaagctctgaactaagaggacacctctaccatgaaaggctttcctcttaaaccgaccatttttctgagcctggtaacgttcacgactagcctgccttccattatccactcctacaatacgagcagggccttcaatttcaaaatgaagctgattggaagccgtcggcacccaatttccatccttgtccaatacatcaaaatagagataaaggaggtcttgcccatctggctccagttttgttttctcagcatgtaacccgattttggctggcttacctgcagtcaccaccctatcttctgccacaatctgaccttgatggtcatagaccacagcacgcaattctcctggttgataatccaaacgccattcgagatagagttgatcagaaccttctccctcttggtattttctaccatctgaagtccatttttcctgaaaagtcttcctgccttgagattttccattgagaaatagttctactgaaccagcatttgaatacactcgaacagggatatccccatacttatccacaacttgttgataactcttgtggatttcccaattccagtgaggtaagatatgaaccatgggatgctgatctgcatccaaccactgactttgatagaaataatagtcatttttaggaatccccgccgtatccacgatcccaaaataggaactcttgacaggtgtgtcattttggttgtgccaaggagtcggctcaccgatatagtccactcctgtccagataaactgacccgcatagtctaaccgatttcgatctactatccaagcagccgtcgccgtcttcccccaaggaacccgatcattaccatagtctgactgttcaaaattccgcacgcggcgattatccccaatccattccttatctgggcgaaaatagctatcacgcgtccgtgtagccgatgaggtttcagacccgtaaagtcgccacttgggatgtcttttgcgaattccatcaatattatcttccgagtaattcaaacccaccacatccagcaaatcagcaatcttttcatgacctccagaaccatctccaaagcggaactggtccattcccatggtcacaaaacgactatcatccacttcctttaccctttctagcaagcgtttgatagtcttcaatgaatgagcatcgccatttgcttcgctgacttcatttcctaaggaccacataaaaatcgctggattattcttgccacgctcaatcatagtgcgcaaatcataatctgaccagaaatcacctgcttttgcttctggatgagttgcttcttcctcaaaaaagcgaccatagtcatactctttcttgcctccataccaagtatcaaaggcttcttcttgaatgagtaggcccattttggcagccacatctagcaagatgctactggctggattgtgtgttattcggatagcgttgactcccatttccttcatttggcgcaggcgtctctcggtagctgacctgttttccacagatcccagcgctccgtagtcatggtgtaaacaaaccccatgaatcttcaaccagcgaccattgagaaagaaacccttatccgcttgccaatccatataacgataaccaaaggtctcctcttcttcatcaaccaaaatgccatttttgtagaggtgagtcttcaattggtaaaggtaaggttgatcaatatcccaaagcaaaggttggaaaattgatattgcttgcttgaaatgatgtttttccccagactcaatcattacagagtctgtcacctgccagtctgaaacctgttgtccatcataccagatactctgctccaaatacaccgacacggactgaggtccatcatttgaaaccttacttgtaagctgggtttccacccaagattgcctttgttcctttagcttgggactttctatcttaatcccatataaatccagatgcaccgaatctgtaatcaataattttacttctcggtaaataccgctaccagagtaccaacgactgctaggttgctgattttccacaaaaaccgcaagctggttggccgtcccatcatttcttagataaggcgtgatatcataagaaaagggcgtatagccactgggataatagcccagcacttgcccgttgatatagacttgggcattcatgtaaactccatcaaacaacaaacgcaccgatacaagactggcatcttcttccaagtaaaactgtgtccgataccaggcctgacccccatttagctgaccaccctcattttgcgctggcgaatactggtcaaaatcattgtgaatactccagtcgtgtggcacttgaatagcctgccaattttccctctgaaaatccgacgccaaggcctcttccttccccacctcttggctaaaaaaccagtgatttcgtaaaacttcttctcttctcatacaagcattcctctttaaacgaatcgatatacttgactatagcacaaaacaaaagcgctttcaagacttcctccatcactccctaaatcctcagaaaagattctataatttgtggaggaggatttagttctcaaagatacaagggtaatacaaaaagagcctgactccaggctctttagtctattatttcttctcagcacggagggctgacaagatttgtgtacggatatcatccacaccatttggcgtatttggtaaaaagatagtttgatttcctttagaggcaaaggtattcaaggtatccaaatactggttggtcaagagtatggacatgatttgttcttctgtcatgccaacattggcttccttgagttcggtgatagactctgccaatccatccacaatcgccttacgctgttgggcaatccccacaccatgaaggcggtctttctctgcttcggcttcagctgcagtgacgattttaatcttgtcggcttcagccaattcttgcgctgcgacccgcttacgttgcgccgcattgatttcattcatggattgcttaacttctgcatctggttcgaccttggtaatcaaggttttcacgataatataaccgtaagtagtcatttcttccgccacttggtgttgaacttcgagggcaatctcatcttttttctcaaacaattcatccaaggttaatttgggaacagaagagcgaagagcatcttcgatataagatttaatctgagattctggacgcatgagtttatagtaagcatctgtcacgctctgctcgttgacacggtactgagtcgctacattcatcataacgaacacattgtccttggtcttagtctcaaccacaatatcgctttgcaacaagcgcaactgaatccgcgctgcaatcgagtcaatcccaaaaggcaagcggatgtgaataccgctattggcaaccttttggtatttcccaaagcgttcaataatcgccaccgactgttgacgaaccacataaactgtactcagtgtgactatcaccaataggagcacacaaaccaccacaaaaatcatcaaaaatgttgttaccatcgcgacgacctccatcattattttttcctgtattatagcacatttaaagaaggttgtgcagtttttactgcgatttttaaaaataaaatgttaaccatctattttgtaactaaaaaggatagcctcatacaaagctatcctttgattctcatcaatgcgccaacatttcttgggcgatttcttgtccagatagattatctgggtagtaggttggccagttatccatttcttcaaagagagcttcttggcttgtgcctccaaagaagatatggaaatgttctgccttaactggggcgatattgtggtcactaaactgaacatacttgaactgtccagcatcagcatctgtggcttcaaagaggaagcgcacgccacgattacctttcttgtaagttaagattttcttaccaacatacttgtaggtgaatttcttactttgtccaccttgaacaaattccatagtgttatcagtgatattaatcttagtcacatctgtctgatagccctttgtatagtaagccttgtactcagcctgagtcatcttaccagtcaacttagccttgtagtcaaagacttgatcaaacgtgccatcttcaaggaaaggataaactgattgccaattacctgcatagtcactcaaggtgcggtccttgacagctgcatcttcaaagtaaccattttgaactgtcttggtatcctctgctttttcaggctcgattgctgggccttcttggtccgttgtttgtttcagagccttgaggtttttctccatgatagagatgtaattttctccagccttggtgtcctcttctgtcagactttctaaaggattaaggacatctgttttgacacctgcctcttttgaaagtgtattagcaagggcttgtgaagcattctcctcaaagtagatataggcgattttatttttcttgacatactctgtcaattctgccaaacgagcagctgatggttctgcatctggagaaagacctgagattgatacttgcttgagaccatagtccaaggcaaggtagttaaaggctgcgtgttgagtcacaaagctcttttgtttagcttgagacaagccttctgcataagccttatccaaagcttgtaatttttcgatataggcagcagcattcttctcaaaggtctcctttttatccggataatctgctgacaagctatcacggatgtgctctacaagtttaatggcacgaaccggtgataaccaaacatggggatcgtactcatggtgatgtccttcttctccatggtcatggtctccctcttcttcctcgctacctggtaagagcaacatatcgcctgtcgccttgatggttttgacctttttcttatccaaggtatctagcaatttagggacccatgtttccatgttttcattttcataaacgaaggtatctgcatcttggattttggcaactgccttggcagacggttcatattcatggggttctgtcccagcaccgatgaggagttctacattagcagtatctcctgcgacttgcttggtaaattcatagacagggtaaaaggttgtcacaatatttagtttgccatctgcctgcttttgattggaacaagccactaaaaacaaggcacatagactggcaaacaataagctaatttttttcacgttagtctcctatttgataaaacgtcttactaaactaatgagtaaaaagacagttacaaaaataatggtaatacttgcacttgcaggtgtttctgcatagtaggaaatgtaaagtcctgctaccattcccaaaaatccaatagcactggcaagcagcataaccgatttaaagtttttccctagacgcagggcaatactggctggcaagaccataatggtcgataccagaagagctcccgcagctggaatcataagggcaatggccacccccgtcaccatgttaaaaagaatggacatggtacgaactggcaagccatccacaaaggccgtatcctcatcaaaggtcaagatatacatcggacgaaggaagaggaaggtcaaaatcaaaacaaccgccgcaatgacaaagagggaaataacctgctcttcactgatagtcacgattgaaccaaaaagatactggtccaaactcattgagctagagcttttacccttgctcatgacaatcagagaaacagccagacccgttgacatgaggatagctgtcccgatttccataaagctcttgtaaaccgtacggagatactccaggaagactgccgcaatcaaaacaatggcaatagtggaaatagtcggagaaatccccagaaccaaaccaaaagctacacccgaaagcgagacgtggctgagggtatcactcatcaaactctgacgacgcaagataaggaaggtccccaataccggcgagaaaagactcatggcaataacggccagaaaggcacgttgcataaagtcataagataacaaactaagcatggcccacctcctgatcattctcatgaacgttgaaacaacgccatggcgagtcttggttacggactagatgaatattgcggtccgcatagtccttaacttcttcagggtcatgggtaatcatcaaaacagccttgccatgatgatgggcgctgtggtgcatgagttcgtaaaattcgtttttacttcctgcatccatccccgttgtcggctcatctaggataaacacatctggatccgaagcaaacatacgcgcgatcaccgctcgctgcttttgtcctccagatagagaccccaagcgtttgtctcggtgttcccacattccaactgagtccagactagccttgatatgctcctcatcatgagcattcaaacgacggaaccagccttttcgcggatagcgacccgacttgacaaattcataaaccgtacttggaaaaccagcgttaaaactggcaatctgttgaggaaggtaagctattctcaatttcttaccctgcgtatttgtctttgaaatggtcacctttccaatgcgtggctggaggattccaagactggccttaatcagtgtcgtcttagctgctccattttcccctgtcaaggtaacaaattccccactatcaacactataattgatatgttcaagaacgggctccttatcataatagaaggataaatcctctaccgtaatgtatctcattatttgatttctcctactaaagcagtcaaaaaccgctgaatcactttttgttcatttggagtaaactgagttgccacttgttcataggttaaaagtgtatgctcatggtgatgatggtgctcctcagcgattggacgagccaaatcagtcaactgataaaaaatcacacgcgcatccttaggatctttagatgtttccaacatcccttccttgaccaaagacttaatggccttggtaactgctgcctgactgacattgaggcgacgcgccaattctgaatttgttaaagattcctctgacaagagcataagaatgtgctcctgagtattggtcagggccacctcgctagtacaatgacctattaggatttcatgctgattttctgcctgcaaaatcacctcattcaaaaaagcatcgatatccttcgctagctgtctcatatctgactcctttccttttgaacttctcttttttaagagaaaaatactattctttgaaattatttactggttaattatatcacaaccaaaaaaagagtcaagaaaaaacgtgaaaaccagtttcattcttgaactcttctatattatgatctattgaaatgccttgacatctccatcataagttgcccagtatctaattctattttagaagacacaacactttttattcaaattatatataaaatggagaagagaaaagtcttctccaaatacatactttacctcactcaagaggtctagaatttataactagaaactcattaaaattttgaacaaattttactcattatccttcttacgaagaacgatacttagaccactcaaaattccaacaaatccgaatgctgccaaggctgcgttcgattccgtaccagtatttggcaattgagctacctcagttgatggagctggataagtgtttccatccggattgtaatttgaaggtactggtttgttcggaactgccggtgttcccgaatcttccgccacaggtacaggtggttttggagtctcgtttcgttgaggtgttggagctggttgtggtgtaggtgcaggagctggagttggagtcggaattggatttggctctggctgtggttttggttcttcaggaatcttcagctctggaatctccacagttggcggatctaacggaactactccaccttcaaattctggcacttcaacttttggagcatcaatttgcattacatattgataaacaatagtagtaacaccttctttaaccaatcctttttcttccacagtatttttaaacttatcacctgctggaagaacacgtttcaatcggaatgttactccatctactacgatagtttcaggagctgtcacagcgtactcttctcctgtagctttgtaagtcgtttcttctttatcaccagtagttatagttgtcgcttcagctacaatgacattgttcttagcgactacgtcatctgcaaggaagttttcattaatatctacgaatttaacgataactgttccttttttatcttttgcgtaatcacgtacactgtttggtttattctgagaatacttaacaacaaccgctgaatctttagattcatgtgttacagttaattcatctacctttgctttatccacagtgtaatctttgatttctggtgacactacttcaacaagtttttgttctggagtccaatctgttgtgtacgtcacttcaccagttctactgttgatttcggcagttcttgtgaaacgagcattttggttaacaggtgcacttgcttcctgacctgcttttggtccattttcgtatacataagtgatgttacgtttcacttctgttagtaaacctaaatctttgtaggtgcgaccttttggatcgttaggaattttatcctctggttttggaggattttgatcaccatcgttaggtttagttggatctactggaataatgtagtcatattggtatacaactgtcgtagttccttctttcaccttacctgtttcttctgtagtattattgaatttatcagaagcttcatatacaccgctgtatttgtatttcttaccattagcttcgataacgtctttacggttcgctacagtgctgtattcttcatttgttgctgtataagtagtttcttcacgatttgcatagacttttgtcgtagctttttctactactgcattatctttaacagttacctcttcactgatttcatttccttgagcgtctacatacttaacaactacagaaccttttttgtcttttgctgcatcatgttcgataatttcaggattttcacggtatttaacaatttcgctactgtcttcagattcgtgcgttactgctaattcagctactttttctttatcaactgcatatttatcgatttttggtgacactacttctgcaagtttttgttctggagtccactcgcttgtatatactacctcaccagttctactattgatttctgcagttcttgtgaagcgtgcattttggttaataggtgcacttgcttcctgtcccacttttggtccattttcgtatacataagtgatatcacgtttgacttcttttaagagacctaagtctttgtatgaacggttttgtgggtcattaggaatcttatcctctggttttggaggattattatcaccttcattaggcttagttggatctactggaataacataatcgtattgatatacaactgttgttgttccttctttcaccttacctgtttcttctaatacgttgttgtacttatcagaaacttcatacactccacggaagacatatttcttaccatctttagtgattgtatcaactttcttttcaacagtattgtagtttacatcattttctgttacttcatcacgagtcgacagtacaacctctcctgacttagtagcgtatgttttcgttgttttaacaactgcatccgtcactacattcgcagaatctttgatttcattaccatcagcatcaacgtacttaacaactactgaacctttagcttcagttacagtcggtgttgtttcctcttgtttatctagagtatagctgtagataacgtgtttctcaccttctgtcacgtcccctgtcgctggagctgaatcagatgtttgccctacatatttataaactaatcctgtagcttcatcttttagcgttgggtattgtttatcagtagtgtcgtatttttctgtaactgtacgtttttctttacgttcagatacttttacaccttttgagtaagttacataagtatcttcatactcaactggcactttatctttcactacttctgcttcttttaatgtttttaacgttccatcttcattgatcacaacgtgtttcacgtcaacagaacctgtcttagtcacaacggagctagacggagttttctcttcttcacttactagacgatattcgtaaacaacttctgtagttccttctactactttaccgctagcagctggagaaccttgttttagacctacatactcgtatgtaaatccagtatcagcatccactaaggttggatattgttttggagttgtatcgtagttttgttctactgttttaacatccgtacgttcatcaacttttgtttcacctgaatataagcttacgatagtttttgtttctaatgtaacattatctttatcagtttctgattttaattgttttccatcagttgtgacatacttaataacgacactaccttgtttagaggctgttgtagtacccgcttcttcttttgtgatttttaagttgtaatagtgagtgacgactggtttttcctcacccattactttgtaagcacggattggtgtgataatttcttttttagtgaatgtcgctgattcagttgtctctgtacgagttcttgtaccattatcaccactaatgatgtatttattttcagcaacagtttctgtaggaatatacttttcatctgttacttttgcatctcctgtaactgttactgtaccgtctgcagcaatttcaacttttcctttgttaactaacgtagttacagtcgtttctttatcaggctcagtttcatctaatggaatatagtcatctggcttaccagtataaacagtgtactctttaatgtttttagttgttataacatcaatgtaagcgtgtggagaataatcatctggagtatatttatatactgtagtcgcgtggatttctctatatgtgccattgttcaattctgtagtatctgtaggctcatttgcagtaaccgatacttctccaataatttttggaaaacctgctaaaagttttttgaatttatcaacagaagcatctgaaatatatccagtattaaggtctataggagcatgcaaaacaaattccccagcacgtctcccagtttttatcaatcctagttccaatttcccagattggatatcatcttctaaagtttttaaatgagcatctaaacgcgctttagccgcttgaactttctctcttccagttgcatctgtcgctttaccttctaagaattctaaagctttataattagcaattgtgtaattttttaaaatatcttttaatgatgattgtgatttatttagtctataatcataactatattcatcgcctgttgctaagttttttacttcagacccagcatacccacttccaaaacctaataatgcgtaagttgggtttccactaggcgttttttctacatcatcagcagtcccataaattccatctgcaccaggtgtataataatggttgactttaggtccatcaaaagtatcgtcctctacaatataagttgaaaaagactccttttctttctcttctacttctatttttctttctactgagaaagtaattgttccttttgtgattttctttacagccttcccttgacccactgcatacgtatctttatcaagaacaagaactgtatcaccttcttggagggttacgttttctttggtaaactctttagcgtcagcttgaccatcttgccattttgtaacagcatcttcatcgctagttactccattatctgctacaacatacttaccgtattgtccatcagctgtctcttccacaagatagactttgccttttgttttagtatagtcgatttcccctagtttattatgcattccctctggagacactgctgcttcaatatcgttaaaacgagttttatcataagtaagcttatcagcaccttctacttcagattttccagcgtactcataaaccctaccattcgcttctacggtgtcttttttaccagtatctttagacacaacagttcctggttgagtcacagttgattcacggtagtctttaccatctttatcataagcaagaccttttttatcataaggagttgtaactgtacctgtcccagctgctactgtgtctttttttagtaatgatttatcagaatccaatttgtaattgacagttgcttctgatttaacatttaacgtatcagtcccatcagcatcgcccgtattgctgttggcttttgtcggttcagcagttcctttttctaataccgcatctacttttactgttttagatgcatctttatcatctgtaaaagttgtggctgatgttgaagctactttcgatgtatcggtcaccattgtagcagtatctgtaccattagaagtaacattagcagctactgggcttgcaccaacagctaaagccacacctgttgccaaaatcgttgcaccgattaacttggaatctgttcgaccatctttatacttacgaagagaaaatttctcctgtctatcagtatgaaacataaaacatcgccttcctaaaatttcattgttttttatattttgaatctataaaatgtgcgctaagaactataaaactaagaaagttttacgctttcaattatatcatatttctaaggataatacatacttatacatatccagaatttcctttttttgataggccttagagaatgttgctgacgagtaacgaccttctttttgataagcaatgagccacaagagtaactccccaatgtcaccaaatgttgtgacacctttggactgactcttatagtatctatgagctaaatctgtatcagacaaaagacagatcaaccccctggcagatgcttctacagccgcattggcaaagcattcactcatagaacaagagagatagccttggtgcttttcataagggacctcttctagaaaacctgcataatggacattcgacggcaagtctttctggctatagccatctggtaagttaccataaatcgttaactggctatccggcacttgccgaaaagcctcaatcgcccaggcacaccgttttatcatcgtcatattgccaacgatacaccaatcggtgactcttgtatattctttttccaaaactccatccacaaacattggaggcaaaaaacaaaccttttctttccctattagttgctccaaaactggacttgcaacgatattttggcaccacccttgcaagacaaacttcatcatgggatctaggatattgtagtgagtataagcaaataactttcttccggtattttggaaaaatttcctcaattgaagaggatattcattgaccatatcaatgataaagcaatctttcactgtagaattgttggctagatagagactaactaactgccattgagtgtaggtttccccacttcttaggttttggtaagaatggtaattttcactcacatcaccttttagcaactcccctttactatcataaagagtaaaaagattttcttgatattggaatcgatacagtaattgagaggtataacattctacatctccattttgataatgaacgagtcctacatatccctcttttgtgtactcgacttcactgacattaactagtccctgaataaatgatttctccacaatcggattttgtctagccaaatctgattgatcaaaaataacatgatagaagttttcaaaaccaagtttttccaatgtttctacaaaattcggtacaaaattatccagatttgttaaaacaatttcttgttctacttgcagacttttaaaaatttcttgacgcgccaattgacttctttcaaagccataagtgcttataggaacgccttcctttattgtaaatactttcaccatagtttagtccaatacatcttccaatcttaatccacgacttcttgctagtcttgcacggaaagccatccctcgtttatgacgttctgataagcgatagtaggtcgttgtgacatttaaaaccagggcattatccttggtaaccatacgagaccacaaatgccaatcttcaaacccatcacacttagcatcatagcctcctgcttcatcataggcagagcgtttaaaaatgacggttgaatggttaaagacattttgataagcaagctctaaccacaatttttctcctgataaatgatgagattgattccgtttaattttatctgttatagcatcttcttctgcgacaactctagccccgataaggtcgagttgaggatttttctctaactcctgcaagagaagatctaagtgccaaggcatccatacatcatctgcatcttgtctggctacataagccgtttgagacaaactaactccacgatttaacgtttctgaaatccctttatgatcttccctaatatactgtattcgctcgtctactagatatggcttacatacttcctctgtattatctgtcgaaccatcatccacaattaacagtcgaaaggcttgatgggtttgatttaaaacagaatcaatcgtttgactaatggtttcagctccattatagacaggcatgacaatatcaacaggtgtgtccgattgagacacattttgatagggcacacctcgttttgcaaaaacatttgattcatgagttgttaaaaaggtccgatacccatgaaccgatacaccctctatatctttgaccaataaaagagaagttgagtaaaaaccatgtacctcaacgaactcatactcctctagcaaaagataaatttcttcttcaaagcaaaatctagtttctttcaatttatcttgataaggattcaaaggtactctaggatggggatagtaataatcaatcttctgttcatctaaaactttagcagtcaatttttgagtaagttccaaatcttcctgataaaggagagagcctaaaaattgccccagaaaaatacttattttcttaccatttttagccctatgaaaatgacttggttcaagatgaagctttagaaaaaactgctgctcttttgggaagaggatacagtcctcaaatacggtataatgtctatttgacaaagacataacctctctcaaggtaaagtttgtataaggaatgcccctctcaagattttgtgtatacagattgagaggtacaatggaagtactaccatcatcaaaagtatacaaattcattgtactgggattaaagatgctaagagctacaggattgtctaagcttgctagatagagattactaatggccctatcttttaaggcttcctgaatatcattaaagactgtttttccttctaaaacaaggacttccttacaaaattcttccattcgttcagcataaaaatcctgtctcgaatcatttgacatctttagataaatcccgataaagtcttctgagacagtctgtacaacttctttagcgactaaaacctggaagggagacgaacaaaaaattatattctccaaatttaactcctcataacattcttacaaactcttacttagcatcttgcttttgtgcaatcatctcttgccaccaatcttcatgttcttgataccaatggataacttcttttaagcctttatcaaaatccacgtagagaggtgtaaagcctaattcagtatataacttactagcatcaattccataacgaaggtcgtgtcctggtctatctgctatatacttgaaatcttcctgagattttcctaactgcaacaagattttctgtaacacttcaacattcgtgcgttcattatttacaccaatcaagtaggtttcaccaatcacgcccttatcaataatggtgtcaatagctcgacaatgatctttgacatgaatccaatcacgaatattcagtcctgctccatatagaactgcctgctgtccagttaaaagattggtgatttgccttgggataaatttctcaggattttgatagggtccatagttgtttgaacagttggaaatcgtagccctaaccccaaaagaacgaacccatgctttcactaatagatcagcagaagcctttgtagcagcatagggagaacttggattgtactgcgttttttcagtaaatttatccttactttctaatgggaaatccccataaacctcatctgttgaaatatggtggaaacggatatcatacttcctagctaactctaaaagattgtgcgtcccgacaatattacttttcacaaaaacagacgtatcgtgcaaagacttgtcattaaaagattctgctgcaaaatgaacaatcaaatcaactccttcatcgatatagttgcttaatgccaactcatttgcgatatccagtttataaaacgataccctatcatccaataaatcttcgattgttttcatcgaagaggcgtaagtcaaattatccaaaatcgtaatctgaatatccttataagtctcttttaggtatcgaacaaaatttgaaccaatgaaaccagctccaccagtcacaacgatatttttatagttcatctattttcccttttatatttttcactcaaagccagtacggtcaacacttacaacttcccattctcttgtatccgcaatttgttttccattttgttcaagtaaagtattaaaatcaggaacaaacacttttacaaaaggctttgtaagtcttaaaatatagcctacccaataacaataagtcgaattgggacaaatgaagtacttgttacagctatacagttgtaaaaagttatcttgaatatcctgctcctcaactataatcgggttttcaaaatggtactgagagtttagaaaaggtaccaattcttcatgacaccaggcaacatcatctgaagtaatacgtatagttaaatgttgaaaattatccccttcaattgctgctatcttctctaaacaagaaccgatatacaattgagcgttataaccgtaattttttctatttcgttcattgagaaaatccgttcttctaatagcaattgtcacattcttctcttcaaattgagcggaagaagctactactggttcaatcaaatactctctacaaaaagagtccaattcttctgaagaatagtcaacacctgcctcttgaaaataaccaaaatcttctaattcgataccatttgcttttgaaaataagacagcggtttttggaaaaaaggtttgggcaaactgaaaatatcctgttcgtaagacataactttcctcataacccatcatccgatctctatgcgcttgtagtaagagatagagcaaatttcctagttgaaaacctctattattttcataaattttcaagattaaaatctccttcttgctttttaaagtatcgtcctaaagtagaattgtcaggattttttaataaattctttatttgtctacctgtaaaaatttcagacttatcgatacccagtttcacgccatcgattctatttaaattcgccatcagatggctgactaaatcatttattgccgtcacttgatagcacatttcatcaggataaatatcagaaattggctctaaagtacttaataattcatttggaagaggctctactagagaccacagctgatcatttactttttgataatagttttctaactcaggcttatccaaaacaatatcatttgaaatataagtccattgtctagaaagcaaatcgttaataaagccctttttcagcgtttttccatataaggtgtccataatataaatagtattgctattttgatgagcctcaatcacactattataaatcttttgatgaatagcgctatatctggcgccactatcaaatacagatttagtggacactaaaatcatatgacctgtctgaatattttttaggacatttactaatttctctatttccgcatcatcgtttttcaaacttaaattggttaataatttttctgatgacggagcggtacaaataaccatatcataaaaatctttcaaagcttcttcaatattatttctattgaaacaacttaaatcaatatcagattgcttccttaatgtatcaaataaaactttcccaactgcacccgttgagccaattaaggcgactttcttcttgcttgattcaattatttcaagaacttctttgaaagatttagcagcttggtctttttcagaaatgattggttttaaaagagaatcccacgacaaattagcgtctttgtctaatggtgtaatacctaaatagtttttatgtggatcataatagtcagcaaccaaataattcaatattccattgttaactaacgactgtgcaccattagccactccaccagggacaaaaacagccctaccaggttggacatctatcacatctacagatttgtaagttggagaatctattcgtaggtcgataaaaatcattttgaaagtaccataagctactgtcatcaatttttcatagccctgacaatgcatccctctgataactccctgctttgaaacagacacattgttttgaagtttatgatgaaagaatgattctggcaccccatttgcaagcaaatctttctttcgccaattctctaaaaaatagccacgctcatcatgatgaagaggactttcaaacaccaacaaaccttgaatctgcactaaaatagttctatctatatccatcttttcccctctatattgtaatgcatccacactaaagctattttcattatgtttcttaaattataccactatatgagttctctagccagatgaaggtcattctttttaaacactcatatctataaatacacatttttattagcataaagaaaaaccctaaaaatcagactgattgtctaacttttagagttaaatcgtttattattttgtcattcgtctattgaaattccttgacatctccatcataagttgcccagtctttactgaaaaagcgctcattcagatggtacatcggagctggagtgggattggataggaaaggatcaacggccttgtcaaatgccaaccaacccaaccaacccagatgaatggtatccttcataaagaaagcttccccaccgtccttagaaaaatctgctatattggtaaacccttgactttctaactggtagcgaatcttctgcaccgtttgttggtacatatcttctcgtaaaccagcatagtccatccattttttattaacaggtggaatgataaaaatcgggtttaccttggatttagaaaactgtgtcaacactaactgcaagtcattatattctggcgacttgagataggtaaagtttttctgagaatcctttaatttcttcaaatccttcttaatctgcgtattatagaaataattctccattcccaaatcattattagaagtatttttttctgcatctgctttaacaacatcttctatggcttgataagaaaactggtctggcaaggtctttaaatacttaactacatgcttatcataattgacatagcctctaactgaaaactgaccaaaaaaggaagcttgacgttcattaaaccgagctaataattcaatcatttcattgtctgcagacgacaattcttctttacttgccaacttctgaaccaggtccttcatagctacatttgggaactgctgtagtaagcgagtcgctgcatattgactagcctgatccccagattgatgttccagaaaactggtcaactggtctccattaaaatactgctgaaaggctgctggctcatagccatttttactaaaccactggggcgagataacatatacaacttgtttattctccagttgtggcaacatctgttgcatcccaaaatactgattgagcgaggcagctcccctctgtcctaaaagataggggcgataagagcggttgtatttctcagccaataccgcaggatgggcaccgtcaaaacgaagccattcactggagccaaagaagggaacaaaacgcatatttggatcagatagtgctctgaccttttgacttcgctccttaaaactatcgatagtagtagccaccgccgaacgcttttcagctcccagatcatggcgcatctcagcaggatagaaaaagataagcagaaaaaccaacaaaccagctatcaagaccggtccgaagatcatccataagcgtttaagcattttgtagctccacaataccagctatgattttattggctgtattccagtcgtcacgaccaaactctgttacagggacacgaatatcaaaacggttttcaatctccacaatcaactcaaccgttcccatactatccaagacacctgcatcaaaaagatcttcatccatcatgtcagaaacatcttccataaacaactcatcaataatttcgataacttctgatttgatatccatattttatttccttttattttttaaaccataaatcattcaagaatccagaaaagattaagaatgacagcataacgacatggaaggtgacaaccatgccaagcaactgaatccagcgattctcaggtagagcagctttccctgcttttttccgttccttattgagcgtttttttcttacgaatccaagcgtcattgataaccagtccaatcccatgaaagagtccataggcgatgtagtaccaggtcacaccgtgccaaaatcccataatcagcatatttacaatgtaggccacacttgaggttacattgcgattcttaaagaccttctttctggtcaacaccatcaccatccgcataaagacaaagtcacggaaccagaaagacaggctcatgtgccaacgattccaaaactcttttaaatcccttgataaaaagggcttgttaaagttgataggactacggattcccattaagtttgagatagctaaggcaaacatagagtaacctgcaaagtcaaagaaaagttccagaccaaaggtatacatgaccactaaagtatagatattaaagaaaccacctgactgcagggctagattcttcagaggaggcaacaaagtctctcctagaatatgggccaagataaacttgtagagaaagccccacatgatatagcgaacagattcatccagcatatccatcaactcatcccgctcaggaatggtctgataattttcattaaaccgcttaaagcgatcgattggaccacttgaaaaggtcggcatgaagagaaggaaacggaggaattcccagagggtaaaatccttaatcactccatctctcagctcgatgataatcccaaccgaacgaaaggtcaggtaagaaattcccaaaaacccaagcaaagactgcgttccattgatagccggctgcaccttgacaaagataattggaagcagggacagaaaactaactaggtagaagacccacttgccatccttactttttcgatagtgcttatagaaaagcaagagcaatatttcccaacaaaggtaaatacccaaggcagccaattgattagtcttcccacctaccaacatggtgacgataaagaagagactaaccagcacttcataccaggcaaagcgtttcttgaaaaagagaccgataaagatgggcaaggttgcagcaatcacatagacaaaatactgaggattgccgtatggctctaaatgaggaagctgttgaaagaactccatcatctcttattcacctcgttaatcaatcctttgatgtcaatttttccatttggagtcagtggtaaactgtctcgataaaggaatttagatggcatcatgtaggacatcatgatatctgttaaatcttccttgatagccttggtaatatcaatatctcgctcaaactgctcacgaacaccgtctttcaagatgacataagccaatagattttgcaccttgtggtctttattataacgtggcacagctacagcagactcgataaagtgagacttattgaggttttgagagacatcttctaactcaatgcggtaaccgttgaacttaatctggaagtccatgcgtccgccgtagagaagtaagccttcatctgtcatagttcccacatctcctgtatggtaggctggtagaccttcaaactcaaagaaggcttctgccgttttttcaggattgttcatataaccttttgaaacggctggtcccgaaacaatgatttctccctgttcgccatttggcaatttattgccgtcctcgtcaatgataaaggttggagaatcagccttggtataaccgattggtaggcgtttgagagtcgctagcatctcgtctgtcacagcaacagctgacagggctactgtcgcttctgttgggccgtaagcattgataatacgggcatttgggaaacgttcgcgtagtttttgagccgttttaaccgtcaattcttctccatcaaagtagaaatgcgtgattccaggcattttctcactattaaagtcttctgacaacatggccatatccgcaaaagaaggcgttgatgtccagatagcgattggcaatgaaaagatggtcgcaaagagttgcttaaagtcctgagtaatagctgaaggaagggcaaaaagtgtaccacccagtgccaaggtcggtgcccaatacatgacagacaagtcaaaagaataagggggctgagccagcatttgcggacgacttggcgtcgcaaattccttgtccgtaatcatccagttggtaaagctgaggagattatcatgtgaaatctgtactccctttggcttaccagtcgtaccagaagtaaagataatgtagtagttatcatctcccttgactggatgcgtgatctcatatctagacccttgagcaaaggcttcttgaacctgagctagagtcatcatcggcgtagaaacctgctccaatgggaagtctgaaacggcaataatcaaacttggctccgctacttctaaaatagctgaaactcgctccaaagccgaatggctatcaattggaatgtaggcatgacctgacttagtcagcgctacaaaagttgccaacatttcatattcttggccaccaaaaacaaccacaggagacttctctggcaaatccagttgatcaatggctgcagccaaactatccgaatcagcctttaaatctccataagtgtgttcctgccccaaaacattgtaaacaggatagctaggctgtgtctgagcaaaatgctcaatggtttcaatcatatctactattggtttatttgacacaataggaattctccttcaagttaaaattcattatagataaagcttccttgaccctgaccaagatagctaaagaagtaaagcagccccagaaagataagaaaatacaaggctgtccgaccaagaaagaggtacaattcttttctctgtttcatcaagaaaaaccattcatttctgtaatttttgctaaataagatagactcttactatagtatttttctaccattgtaccactttataggctagtttttcaattgtttaccgtacattttcactagatttcagcttattttaagggttatgcgctttttctatgtatatttcaagtagagtgatactgtttcaaaactccatttcatgagaaaatgaaggaaatcttcccataataaaacgcacgatatcaagttttttcaacacctgatactatgcgatttgctgatttttaaagactttttaactagtctctcatttaaaataatctcgtctgatataaattaaaatagcttctatcaccagacaaatggccgatatccaaaaactgatactaataccaaaactctcagtaatatagctcattagcaaaacaaatactgaaaatgctagtgtcgaaatcacttcaagaacggaatagacattaaccaagttattttcctctactgtttcctgaagaaatacactttcaggaacttcttttagttgcgataacataccaactaaagctgaaaatactaaaaacatctgtgcatttggaaaatatagaatagtcagtgtcactattgccatggctacaagaggaaaaagaatactttcccatttagcagcaagaaacttttcagatagccgaaaagcaattaagccactaattataatcccgatagaatatgctgtattagaatatccccagtaactttccgtttcatttaataactcagttacaaagacaagtatgatagacgaaacccaaatcgtatttgagaaaatttcaaataaatttgctgatacaaaaagtcttaatctaggatctctagcaactaacttccaacctttgagcaaaatttcaagattggtctctgactctagtacctccacttcagcgttaggcagaaataacatcagaaagctagaaatgatatacaagattaaaatgataaacgtggtaggcaacagaccaattgttgcaaacaagagtccacccaacccccaccctaccaattgaacagcttcaccagtcattgacaaggctgagttagccttgcccaaatcggtcgcatagcgcggcacaatagcataggaaacgggtgctgcaaaaccatctaatatggaaattgcaacaacaaatagatagatcaccaaaggcgctactgattgcattacggtaaacattcctaccagtatcgccaataatatagtctttccaaattgggataaagataaaaccctatttagcgctatccttttagtaactaaaggaactaaaagacttgcaacaaaagaggatatccctattaaaatgggaactagtgatgtggcaattactgattttgaaataatgtatatgttagcaatgattgttactctaaagaaaatatctgctaaatttgcaaacaattgagagactaacaatttgataaatgaattagacatatagctctcctatcttagttgccaactttggaattaaaatttgatttttaatattttagcataaaatagcagaaaacaaaagtgaggttttttacatgagaaagcaaaagctagtgcctttattcttcctattttttgaaggaattattatcgttggaggctagctctaagaagttatactcaatgaaaaaagcctgagatactcatctcaagctctattttctaaattagaaaagtgagaatacgagaacggccaaggctgctccgataacaggtcccacaacaggaatccaggcataagaccagtctccgtctcccttgtttgaaattggcaaaatgctatgcatgatacgaggtccaaggtcacgcgcagggttcaaggcataacctgttgtcccacctagtgatagaccgataccgacaatcaaagtccccactgcaaaggttccgattcctgcttgaaggtcataaagtcccaaagcaaagattgtcaataccaatacaaaggtgccaaggatttcgctgatcaagtttgatacagtatctttgatggctggtccagtactgaaggttgccaggatatttcctgcattttcttctgcctcatagtgaggtttgaattgcaaccaaaccaaaatctgaccgagcatagcccctgcaaactgagctaggatgtaaggaaaaacggaagcccaaggcaagtcaccttttaaagctacaccaattgtcacagctgggtttaaatgagctggactgagcttgccagatacaaagactgcaaccgcaactgcaatcccccaacccatagtaatcacaatccaacctgagctgttgctcttggtttttggaagaaccacaccagcaacaacaccatttcctagaagaatcaggattaaagtccctaaaaactctccaaataattcattcatcatctttctgtctccattaaaaagaaggagagggtagactaggagtcctgccctccgcctcttttattttttcttaattttttaattctgctaaatcgttgttagcgagagccgcttcgacatccgcacggtagcctgctttttcttcttctgtccagtcatagaatcgtcccatttcatccaaaactggctcaacgatgctatccaaactatcacgcataaagagcatgtggttggtacgacgaagaaggaagtcaactgggctaagagccaactcattgcgcattgcatagtgaagtgacaaagtgtctgccaaactgagtcctggcgcttgttccaaactatgagcaagagcaaagactttcggtgcatttgaaccgtagagatttgctaggtaatgagcttccttgctatccaaaccacgtgacactccaagttgcgcaaaggcttcgatttctgagtccacatttgctgggttcaattccccacctgaaacagggtaagtcttagaattgatcagtttaaagctacggtcaaattctgctttgaggatgtcaaccacgcgctccatagctccttcagccatcttacggtagtctgtgattttaccaccagcaagggtcaagagaccattatcatctcggtccaagctcgaaccacgtgaaactgcagatgggtccaaatgtttctcagatgtgctactttcaagcttgctgacagcagcctcaacatcttcacgcgttttttctttagagagataagattcaacagtcgcaatcaagttgttaaagctttcatcactgatggttccgttatttcctccattgtagtcagaagcgctattgcctgcgatcaatggacgaagacctgcccagctgctttcgatatcatcaatggtgatgttggcttctgggaagcggttgttgacaatgccaagtaggtaatctacatcttcttgagttacttttggatgttccaaatcacctgtgtagtctgtatcagttgtaccgaagtaagtcttgttttcacgtgggagaacaaagaccatacggccgtcacccaaacctgtgtcaaagtaaactggctgtgaaaccttgattttgcttgaatccacgactagatgaactcccttagttggacgcatttgtgagaattgggttcccttattagacaaattgcgcaccttgtcgctccaaggacctgttgtgttaatcaccagacgggccttgatttcaaagacttggtctgtcaacaaatcacgagctaccacacctgtaatcttgccactttcgtcaaataggaaaccttctgccttcacgtggttagcaatgagggcaccgtcttggttggcacgtttgatgttttcaatcacgagacgtgcatcgttgttacggaagtcaaggtaaaccccacctcctaccaagccttctttcttcaagtttggctggcgttccaaaacttcttccttgctcaagaccttgttagcagctggggtgttgttaactcctgccaagaggtcgtacaagtccatagctactttcagacggaagaggctaaaggtcgctccatcttcatcgtaaactggcaagagcattggatctggttttggaatatgtggagcgatttgttgaaccacagcacgttcagaaaccgtatctgataccacttctacgtcgaattgtttgaggtaacgaagacctccgtgaaccaatttagttgaacggctggatgttccttctgcgaagtcctgcatttcaatcaaaccagtctcaagaccgctagctgccgcctgcaaagctacaccagcaccggtgattcctccaccgataatcaagaggtccaaggtacgttcctgcattttttgaattgataattcacgtgttttctttgaaaattccatatttacacactttctaactaagtcgctttattcttccagtattagtcgtctacttccgcaaagacttgggttgctttcacagctttcttccagcccttgtagagttgttccttgcgagattcattcatagatggttcaaagagttctcctgtctcattcaagagtttcaactcatccaagtccttccaatagcccactgacaaacctgctaggaaggctgcccccaaagctgttgtttccaagtttttagcgcgtgcgatatcgattcccaaaatgtcagcttggaactgcatgaggaaattgttcatagctgcaccaccgtctactttcaagacttggatagctgtctgagcatccacttgcatggtgtcgatgatgtcacgcacttgataagcgatagattgcaaagtcgccttgataaagtcttctttagttgttccacgagttaagccaaagacagaaccgcgagcgttttggttccagtatggagcacctagacctgtaaaggctggaacgacataaacttcatcgttgttgtgagaatcacgagcgtatttttcagattctggtgaattttcgaccatgcgaagaccgtcacgaagccactgaatggcacttcctgcgatgaagatagaaccttctaaggcatagtaaaccttgccgttaattccgtagccaatggttgtcaagagattgttctcagacaactgcatctcttcaccagtattcatgatgatgaaagaacctgttccataagtatttttaaccataccaggttcaaaggccaactgtccaaagagggctgcctgttggtccccagccatacctgagattggcacttctccaccgtagaaatggaatggaactgtcttaccgtagatttcagagttagaacgaacttcaggcaacattgctttaggaatattgaggatttctaaaatctcatcatcccatttgagttctttaatgttataaagcatggtacgagctgcgtttgagtagtcagtcacgtgagccgcaccgtcagtcaatttccaaaccaaccaagtatcgatagtaccaaagagcaattcccctttttctgctcgctcttgagcgccttctacatgatccaaaatccaacgaaccttggtcgcagagaagtaagcatcgatgatcaaaccagtcttttcatggaatttttccacataaccttggctttttagttgctcagccaaaggtgctgtctgacgtgattgccaaacgatagcgttgtagatagggagccctgttttcttatcccagacaacagttgtttcacgctggttggtgatcccgattgcttcaatttgacttggcttgacaccactttcgatgaaagcacccgcaataactgactggactgagttccaaatttcattggcattgtgctctacccaacctgcctgagggaaaatctgggtaaactctttttgactcgagctgaccttttctccttttttgttgaaaataatggcacgagagcttgtagtcccctggtcaatggccatgatgtatttttcttgtgacatgtgctgtcctcctgataaagatcttgaggatgtttcctctttacacttactagtatacaaaataaagcgctttcttgtttatcaactttttttaattttttaaaaaatgtgaggagattgtgtgaatttcacaaaaaaggcctggaacaaccaagccttttaagtgaataataactgacgaatcgccgccaaatcttccatatccaagtcattttttaaataataaactggtgtctgttccttcttatgaatcgggttattggtaaccagcaaatcataatgccgagttcggtcatagggttcaatggtaataaaacgattgtattccaaataccgtttcaaaatggctgccatccttgaaaagacaagaaaaccagatgtcaaatccagaccaatccgcatatgctgaccaccattttcagccatatattccatcaactgaagccattcccagagaattttcttatccaaatccgtcccctgctgaaaggcaggtagagcatgaaaaatctcctctgccgtccccctaaaatcatgttccatcagcaaataaggatgacgattctccaactggtacttgtagcggtcctgtaaaatatagcccttatagagatagacttgagcacaaagctgactgagttcataggtaacgtgatcctctgtataatcacccagcaactcctccttcttcatttcttgaatcaactgtgtcagcaaatctgccaactgccctccaaaaccaaggatatattccatagtatgaagaggaagaatgcgatgagataggaggaaagagaagaaaatcatcatctccccatcctcagttcctagaggaaggtgttgtccagcaaaaaaggacggagcctttctcagcaaacgaaggtagaaaatattgtcaaaataccctcgcattttctcttctatcacttggaactgacaagcattaacccgaagacgctgttgactgatatgagcccagagaaccaagtccaatttctgacccgaagacaaacttgcaccgcagatttcttctaaagtggcaatctcctgttttctctctggtttctgcatgtgaccttcccattcctgactggaccagaccttccggaaaagacagaaatagaaatagcgaatctgatgctctggacctcgccaacgtccattttggatagataagtcaaattctgacaaaatctgattcaaactagctaagtggcgaccaagcgtagcctcactaatcatcaattcttgagccagctgatgggctaaaaactgttggtggtagagaagataaacaagaatctggtatttaacagcattctccaaaaacaagctccgaatatctctccccttggtagctgcaccgattgacagacgcagattttcatcttctaaggagatagtcagctctaagccactgtccaaagccttgtcattgagcagggtgacatatttggttagagttgcttttgaaaatcctgtttcctccattacagccttgacggtcgtctgagactcttgtaatagaaaggaaaggattgaaaattggccagattcggccttttccatcaaatctcctaaatacatttgttacccctttcattttctaccttaagcatagcataaatcttacaaatgctgaaataatctgtttctctttttattttcatgctgatttcctggtccattatcctaaaaatcagcaaacacacggctccccctttgggcatttttatgctaaaatagtagctatggataaaattattaaaacaatatcagaaagcggagcctttcgtgcttttgtccttgatagcacagaaaccgtccgcactgctcaagaaaaacaccaaacccaagctagctcaactgtagcgcttggtcgaactcttatcgctagccagattctcgcagccaatgaaaaaggaaataccaaactaacagtgaaggtactgggatctagctctctaggagccattatcaccgttgctgataccaaggggaacgtcaaaggctacgttcaaaatcctggtgttgacatcaaaaagactgcaactggtgaagtcctagttggaccttttgttggaaatggtcaattcctcgttatcacagactacggtactggaaatccttacaactctatgactcccctcatctctggggaaatcggtgaagacctggccttttacctgaccgaaagccaacaaaccccttcagcagtcggcctcaatgtccttttagacgaagaagacaaggtcaaggttgcaggtggtttcctagttcaagtcttgccaggagctaaggaagaagagattgctcgctttgaaaaacgcatccaagaaatgccagctatctcaacccttctggaaagcgacgaccatatcgaagccctcctcaaggctatctacggtgacgaggcctacaagcgtctttctgaagaagaaatccgtttccaatgtgactgtagccatgaacgttttatgaacgctctttctagccttccaagctcagacttacaggaaatgaaagaggaagaccatggggcagaaatcacttgtcaattctgccaaacgacttacaactttgatgaaaacgacctggaggaactcattcgtgacaaatcttaacacaccttttatgattggcaatgttgagattcccaatcgtaccgttttagcacctatggctggcgtgaccaactcagcctttcgtactattgcaaaagagctcggagctggactcgttgtcatggaaatggtctctgacaagggaatccaatacaacaacgaaaaaaccctgcacatgcttcatatcgatgaaggcgaaaaccctgtctctatccaactatttggtagtgatgaagacagcctagcacgcgcagcagaattcatccaagaaaacaccaaaaccgatatcgtggatatcaacatgggctgcccagttaacaaaatcgtgaagaacgaagctggcgctatgtggctcaaggaccccgataagatttactctatcatcaacaaggtccagtctgtccttgatatcccccttactgtcaaaatgcgtaccggctgggccgatccgtctcttgcagtagaaaatgccctcgctgctgaagctgcaggtgtttctgctcttgctatgcatggccgtacccgcgaacaaatgtatacaggtcatgcagaccttgagacccttcacaaggtcgctcaagctttgaccaagattccatttatcgccaacggtgacatccgtacagttcaagaagccaaacaacgcatcgaagaagtcggtgctgacgcagtcatgattggccgcgctgctatgggaaatccttacctcttcaaccaaatcaaccattactttgaaacaggagaaattctacctgatttgacctttgaagacaagatgaaaatcgcctacgaacatttgaaacgcttgattaacctcaaaggggaaaacgtagcagttcgtgaattccgtggcctcgctcctcactacctccgtggaacatctggcgctgccaaactccgtggagccatttcacaagctagcaccctggcagagattgaggctctcttgcaattggataaagcatagtctcacatctacaactcacaaaaacgacaaagctcaaaaatgagtcttgtcgttttttatatgttttcatcttgtaaatctaattgcttcactctagctatatagtaggacataatcaaaaacaaattgaggctgataatccaaacagaccattcatgaagaaaatgcatcaatacagccaagctgattgcccccactatgaaacttcccacaacaatcccataatttaaggcttgacgacggtattcttggatatttccttctcttctagcaatgcgatacaaagcggtcaacatctttcggtaatttccagacgtcataaaaatgacatagggatgatcttcaatcaagctacccgtaaatgttagcatcatcattcctgttcccaaagcgatgaaaggaacttctaatagaggagatcgtgaaaagaaaggcaaaataagtgtcccaataaataaaggaagcaacatcttaacccgccagtaggccgttttgcggtattctttcatgtgtagggcaaacagaaatcctagagaaaagaagataattgagcagaatcgcagcatcgtattgatgacatttgagtcgtgccaatcagatataagtaggagaatattccctgtctgtgtcgctaccaaactatggtattgaatatggcaaaacacatccaaagaaccacctacaaatccaagaaatactcccattagtcgtgtgttttgaggtaatattaatttatccgccatgtattatcactcgttttcctttgatttttttattataccactttctcttggagaaactaagtgaaaaacagttggctcactcttttacagcacgatttctagtaaaagttaaagcaccaaattttattattgactcaaagcaacactggaaaccttaccatccgctcctgttgtaatttggatgacttttcctccaccaattttggcattatacttaccatcatcaagagtataagaatagcctttgatagagtaattttctttctttccatcagaagattctactgtaaattgaccacctgatgaaactgtgatggtttcgccatttgctcccttccaattgcccgctgcagctgagaaatcaccatctaccatggttaaaacacccttgtagcgtttattttgctctgcttgtttgtcttgaagtttgcggtcagttgtaggatcatagcttgattggttagattgggcttgaggagcttgttgagttgaaggagtctgagcaggagtttgttgactagccacttcttgaccttgtctttgctctggtgcaggagccgcttgtgatggcgttgcagttgctgaagattgatcagtagacgccttagtcttttcagatgaagctgaacttgaggacttctgagtcttgctttctttgttagaagaagttgctttagaacttgatgactggcttgtcttagcagaactgcttgcttgagttgtttcctttttatttccacaagctcctaatagcaaggtagaagccaatacagttgctgccatcaatttgatataggttttctttttcatttttctactcctttgtaatattttagaaatataaagaaatctttttgtaatataattgtaacattcagttttaaatatgtcaacaatttatctaaactattttaaaaatcttaaatactttagatacatttactcctcctactcttctattcgtaataaaatagaaaaacaggagattttcctattaaaaatttgaatttgtttttgtgtaatcgcttgcatctttaagtacaaagaaatataataacattgaaatagaatataggaggtgcattcttatgctaaataagtattacaagtatcttccttggttgattttgggagctattggctcttatcaatcagcaacttactatgcgcgaactgcatttgacatcttctatctgactacaatctttttgattgtttatatcgctttgttatttttacatgagaactatctcaagtatagatacaaagacttctttactcacatgttgagtaattctaagaaagatagccatccctaaaacagtcgcaacagcaaatcaaactaataaaggcaaataaagagatcgggaacttttcccgacctcgttttttatttcaatcgataggtttttcttggtttctttttaggcactcgtttgagtccgacttcttctacatattctccgtattttacgagaaagttattgctgacgatggggcgaccggggttgataagattgaccagttcagtcccttcgtagacagtgaactcctcctctagcagataaaggaaagtcggattccagtcaagtctcccttggattcgtttgatggattcttggataatggcataatggtcaaaagcgaaggcttgttcctccaactccactccctttaagaagcacttgcctgtctgaaaatcgacatctacaaaaaccacatccttagcatcgtctcctgcttgaacaagttctaatgcacgactaggcagataaaccaagtgggcaatggtcactgtccagccccgggggtcacggccgggggtcgatacggtcattaattgctcgattttttccaaaggaagatcgagattaacttcttctctcacctcacgctgacaggcatgcgcagcatcttcgcccttgtccataaatcctccaaccaaagccaaacaattttgataagggtgagccttgcgacgaattaataagagcttgatctttccttcgacaaagcagtaggctaccatatccaccgtcacacttggtttttcgtattgaggaagttcctgcttgtagtaccaatccaaaaactcctcctgactggcatgaatttcaaaatattctttttccgtcatccctgctggaatcatcgtgtccgtcattttatgcctccttacgaactgccttggtccattggtaccaacctactagactattgagtgtgtaaacccagtacatcccttgaatatggatattttcaccccaccagaggtagatactaaagagattggttgcaatccagaaaatccattgctcacgatagagacgtgtcatcaagagctggccgacaccattggtcgcatcggtaacactatcacggaaagggcgagcactatggatactttggtaagctaagcccataccaatccagatgatagcagtcaaggctaagtacttgagccagtcaaaaacagataatttcttagattcaaagtgagattcttctacttttccttggtcattgatacggttggacagccaagcatagagaccaatcggctgcatgacaaagaagtaaacagtcgtcaaaacttcaccataaaaagtcgcattcatagccaaaaccaaatagatagcagagttaatggccccaaagagataattgcttgcacgtccttctgctaccaagataacacagacaatcccagtccaagatgcaaacaagctcatccagtcatgactttctgtattttgcgtgaattctaaaatcaagggaacacttgacaggacggtgagatacaaccactggaagagactacgtcccataaagagatccttccagagcaggcgcatgattcctgcaaaaccgatcttacgagcttctgcatgaacatttttaaagttttcgataaattgtgtgattttttcagttagttttttcataattttctcctaatctgcttggtaaatggcatcaatagccactttggctgcttcataattgcctaggtaatcctcagctagataaactagtggaatggtggttaaatatcgctctctcatatggtccaaatgctgggaaaaactatgacgaatatggtcttctgccatagtcatatctctaaatccgtcattgacataggagccgaccggttgcacaaagagaatcaagtcccatttttccttagccaagatcgaaacaaagagattatcaaaggtttctcctgataagtccccttggtcctcggtctccatgtaataatcatagtagcccttagttactaaggagttggtgtcagctatcaccaatcccctattggcattactgtcaattaacttagaggtctggtcatactgccccaacaggagataatagtaatcttttggagtcaattcatcgtcgcggacattgtttttaatctggtactcacgtgcgtattccaaactgacgggtgcatcgtaataccttgccaaatccttggccagagtggtcttcccattgctggcactccccataatcaatactttctttgtaaactgacgacggaagggctgagcgatgtttttccaatatttgcttggattttctcgaatcatagtcgctgagattccaaactttctttcttgcaaaacggtctcaaaaccacgatttgataattcttgctggtagtctgcttctcccacaaagaaaattagttcttgctgggtttcatcataggaaatctccgctaacatttggtccaaccactcctgccagcccatagggtagcgaggaagattggtttcatctaacttacaaaccaaggtcaactcgtcaccacgaaaggcctctcggatatagcggaatcttttttgaagcgttaagcctacctgctctcctcggtctccctcatagcctgaaacgacaacccagacctggtcacactgtcgcttcgcacgctgaatcaaatcgatatgtccttgatgaagtggagcaaaggttccaaataccactgctgttttctttttcataaacgcattacctttttatggtttttgatatttttattatctatgtttttattataaactatatttttgttttgtcaatagttttttattattttttataaaaaagtagcaaaaaagagaatcaagattactcctgattctccatttttatacaatatcaaattttaactggcctgctttaacaccaatcttaagtgtgctgcctgcctctaattctcccttgagaagaagttctgccaacttgtcttccacttctgtttgtagggttctgcgaagtggacgagctcccatttctggattgtaaccgtgactagctagcaacttcagtgccgaagcttgtagttttaagtcgatgcccttctctgccaggctagcaatcaatggtttaaccataatcttgacaatttcctgcatgtggtcgctatccaaactgtggaagaccaccttttcatcaatacggttgataaactctggtcgataagtttttttcaactcttcaaagattcgtttttccatattttcctgatcaaaacgaatatccttagctccaaaaccgacggtcttgtcatcccgaagggctgtcgcaccaagatttgacgtcatgatgataatggtatttgaaaagtcaaccttgcgccccttgctatctgtcaagacaccatcatccaagacctgcaagaggacattaaagatgtctgggtgggctttttctacctcatcaaagaggagaacagagtatggtttgttgcgaaccttctcggtcaactccccaccttcttcataccccacatagcctggaggagctccgttgagacgactggctgcaaatttctccatatactcactcatatcaaagcggataagggctgattcgtcatcaaaaagaacttctgctagagccttggccaattcggtcttaccgacacctgtaggtcctaggaacataaaggaaccaatcggacgcttgtgactgcgaatccctgactgattgcggcgaatggcacggctaatacttgaaacagcttgatcttgaccgatgacacgtttgtgcagttcagcttccaagtttaggtatttcttagcatcagtctgagtcagtttttggactggaatacctgacaagcgactcaaggtggtcaaaatatcagactctgtcaccaagtctttatagacaggcacttcctcttcttttgcgattaactgagctgcctgtttccacttaccatctatcaaggccttgtcagctggactcaaacctgaatcgtctgcttttacatgcttagccttattttgcactgttgctgctgcttcatccaagagatcaatagcagagtctggcaagtgacgactagtcaagtaacgatgagccatcttgacagctgtttcaactgcttcatctgtgatttgcacacggtgatgtttctcataagtcgccttcaaaccctgtaaaatgatcatactgtcggccacgcttggctcttcaatcgtcactttcgcgaaacgacgagaaagggccgcatctttttcgatgtgtttttgatattcttcctgagtggtcgcaccaaccgttctcaaagttccacgcgccaaggctggtttcaagatattggccgcatccagagttgagtcaattccactaccagaacccatgatagtgtggagttcatcgataaagagaattacttgaccatcttcctcaatatccttgatgatattattcatgcgctcttcaaagtcaccacggaagcgtgtccctgcaacgacattcatcaaatccagctctaacacgcgcatcttagccatttccgcaggcacgtccccactagcaatacgctgggcaagtccaagcgccagagctgtttttccgacaccagcatccccaaccaagacaggattattcttagtcttccgactcaaaatttgaatcatacgcgagatttccttgtcccgaccgataactggctctaacttgccagaacgcgcttgctctgtcaaatcatgcgtatagtcctcgagaccaccgcttggagtctggggcatgcccatcatattagccatagaattttgcttatcagctactgtacgatggcgttggcgtaaagccttgagatcttcacgagtccaacctgctcgttcttctagatttcgacgtagggcagcaatcttgacctgatctttcttgtcttcataagaaaaaccagctctctccaagatacgagtcgccaaggcattgccatcatgcaaaatcgcatagaggacatgctctgtccctagcaccttagcatggaccactgacgctacatactctgcttcgtcaaaaaggacctgcaaacgatgagaaaacggcaattccgtaaaggtttcatcctggctatagtccgtttcagtcagttccaaagcgacctcttctaaacggtccatctcatatggataatcatttaaagtcgcccctgccacactataactgtgattagacatggcaatcaacaagtgccaagactctaggtaacgagctccaaaatggccagccaccatgtaggcactttcgatacattcattcaatgcttttgaatagttcatcttacttcccttttctatctacctcttgtatgacctgtcgtagcatgtttgcacgaacaactggagcttcttctcctagaacgcgatctaaagctactgccaccagcaaattcatctcctgcttggtcatcaattcctgctcaaccaaaagctgcagaatatcctcataaatttcttgactgacccgctcaccaatcgagtaaagcaaatcgcggagcatttcatgatgactagaaaactcaatccgtcctatgcgaatgtagcctccgccaccacgcttactttcaaccaagtaacctctactttccgtaaagcgtgtcttgatcacatagttaatctgactaggaacaacctgaaaagtatctgccaactgactccgttgcaactccacaattccagattgatctaaaatcgccttgatgtaggcctcaatatgatccgatgtatttttaaatctcattacaaacccacctctctctttaaaccttgactatctttgactattataccgaaattttctcatttttaaaagaaaaagggcgctggtaaaggataatcttcaccaactccctatttttctacttatctaagcctaattctaccaaaatttgacgtttataggcaatcttttggacttctttgtcctcatcttcagaccaatctagtttaatttctgaaacaatctgcccaggtcgatttttcaagatatagatgcggtcgctgagactgagggcctcctcgatactatgcgtaatgatcaaggttgttagctgcaactgcttgtgaatctcaaggtaccaagcgtggagttccatcttagtcatctcatccaaggcgctgaaggcctcgtctaagagaaagagcttgtgcccgaaaaggtaggttcggagcaaggctacacgctggcgcatcccaccactgagttcatgagggtatttatctcttacagctgtcaactggaaggtcgcaaggatgtcatccgctcgggcaacggcttccgccttatccactttttgaatcaagaggggcagaatgatattaccaagcacggtcttgtgctccaagagcagatccttttgcaacatataactcacgcgcccctggggattttcttcaccatcaaggacaattctccctgactgaacttctaaaatacccgcaattaagttgaaaagcgtagtcttaccaacaccacttgggcctaagatagaaaccacttcacctgaagtcacctgcaggttgatatcctctaaaatcctctcctgaccataggcataactgacttgttctagtctaatctctgtcattatttcacaaattcgttggtgaatcctttgtctgtcaagtcttctttaaggataccattttctttatcccatttgtagaaggcattccagcgagctgcatcaaattgaccccatttttccttgtcgcttgcgtattcttttgacaagtatttttgagattcgatgacaaagtcacgtttttccttgagttcaggcgcattcttgatgaggatatcagctgcttcctctggatgctccatagcatattggtagccttttttgatagcttgaatgactttacgagcttcttctttgttgtctttcaaatagtcattgtttgcgatgataactggtgagtagtagtcaaactccttgacatagtctttcaagtacaagaagttagcatctacaccttgagatttggcaaggataccatcccatccatagtagatccaagcagtatcaaagacgccattggcaatcggtgtgattgagtttgagtcgttgtttggtactttttcaactttttcaaagtctccaccttgtgattctaccaaggttttcaacatagcaagttcagttggatcattccaagttccgtatttcttaccaaccaagtcctttggactagctacattgtcagatttacgagagatgattcctgatgtattgtgctcaacaatagctgcaacggcagtaattcctgctcctttttccaattttttagccatgtagtcttggaaataaactgcaaatggtgccttaccgttaataaccaaatcagaagaactttcttctggtggcaatttcaagtcaacatccactccagcttctttgaaataacctttttccttagcaacataaagccctgtgtggttggtatttggtgtccagtctaggataaagtcaatcttcttgagttctgcctccttgttgtccttagaagcagttcgttgaccacaagccacaagcacaacagctacaagagctgtcacaagcgttaaaaacactttccatgttttcttcatttcaatttcctcttttctttttcagaaacattctaattctacgaacgtttccatttaataacatatttttcactaatatcgaccaacttcatacccagaaggctgataatcgataccagaataataatagcgaacatggtatcatactgaaacaatttcttggactgaatcatgtagacacctagtccttcaaagcctcccaaccactcagatactactgttgtgataaaagcgtaggagacactgaccctcagacctgcataaaagtaaggcaggctgactgggattttaaaatgccaaaggatttgccaaggtttggcccgcatcagactaaataaggtcagcatatccttgtcacaatgcctaaaaccgtccaaaatgctaacgatgataggaaaagtagtcgtcaagataatcaagacaatcttaggtaaaatcccataaccgagccacaagaccaggataggagctatggcaatggtcggaatggtctgaacaaccaccatcatagggtaaatcaggtcattgagccaagtcaaactatccataagcacagccatgagacaggcaatcaaaactcccagaaccaaccccagcaaagccactcttaaggtcgcccagctatggtgccagagaaattctctatcacgaacaaaggactggagaatttcaagaggtgtcggaaggataaacttggggagaagtttaagaaaacctgctaactgccagattgacaagactcctagaaagcccaatagactaatgtgtcgtctcagtatacttttcaagtttctcatcaatacttaaaatctctcctacatttattttgacattggcaaagacattttctgcctcctgccctgccacttctagcgcttcttttagaatgcgcataagttcatcaaactccccttccaagactgtttcaaatggtgtcactaccatggtcacttcttgagcttgcagataagcaatgacctgatcaataacagcaatccgatcaattccctgtgataggggtaaaacttgcaaggcaatgcttgctttcataagaacctcctcttctcgttttcctttgacaaaaagaaaaacctttaccatatatggaaaaggtcaagaatagactaagtatcgttccctacgctggcattacccagatcaggtgcggtcgaagtttaacacttcctctcagactgtacacagactcccatatattatatggacatatgatagcgcaaaataaaaaaaatgtcaaggaaactgcttacagaaaagagtaggaaattttcctactcccattttctatactcgttctccgtcactgtttactctgtagccatccactgtagtattaacagctagctcacctgaagagtaagaataataccacttacctgagacttgataccaacctgttttcattgctcctgaactatctagataataccacagaccattttcctttaaccagcctgtttgcatttcaccagatgatttcaaataataccaactagatccatctttcagccagcctgttgatttagacccatttgatttgaaatgataccaactaccatttattttcttccaaccaatagtcaatccattattggatccatagttagaactattccctgattgattctgtgaagaggttactccctctagctggatatagcgacgacttccgttataagccgtataactcaaccacttgtacccatctttttcgagaatttgatcataatgaacattctccccaggataatagtaatcaattgcagttgcgctagctagaggctgatttttgatagcagccttagacttgaaaaaatgtgttcctcctgttgaaggtgaggattgactattcccaacactgccaccagctaaatctttaaaatgaataaagccagtcatggtattggccttcacgacgcgcttattgtaagattctcttattccatagttgtattcttcaatctcaatctcatctcctattacatttgacacccaagcaacatgaccataagttcctgcagtagaccaagcaatggagccaatcgctggtctattatctacacgatagccttcacgacgagcccgatagccccattcattcgcattcccataagcagccggaatctcaaaaccattcacattactcaaacgaaaggctgcaaaagaagtacattgacgagaatacatgcgccacttatcaatctcctggctcccatttttataatgagcaggataatcatccccacgcgcaatcgatccatttcctccggaataggcatatacactattacccgctgctaacatcaatcctactactaaaaagggaacaacttttttagctgattttctaaaagaaaatcctgtctctgctactttaaatggtgaatttttcattcttcctccttgaaaaataatataaatcgaagattaccttcacttaaactattcggagaaaaaaagaaaaagtgagaaaatttctcactttagtcaagataatgaatcaaattcttttctgtaaggatatctgagtaagtaaaggattcaacgtaaacattagcttgtttatctccttcaacgttcccaaattcaacgataaatagggatggataaacctcaattagcttacccaatctatttttttggcgcttacgaccattctccaaagtcatttctacgacttgtccctcatgtgccttgatttcttctttgatttttttcatcttggctacatctgtaaatgcatctgacatcttatgcctccctctttgagatacttgaaaatttattgtattctttttggaaaattaattccaccgttccacgagctccactacggtttttctcgataataacttctaccttattattcggtatgccatcctcttcttcaccaccacgctcatagtaatcgtcgcgataaagaaaggctacgatatcagcatcctgctcaatagacccagattcacgaatatcagacaagaccggtctcttatcctgacgttgttctacaccacgagaaagctgacttagagcgattactggaactttcagttccttggctaggattttcaactgacgtgaaatttctgaaacttcttgttggcggttttctcgcccagttcccgtgataagctgcaaatagtctatcaaaatcaatccaagatttccagtttcttgagccagtttacgagaacgagaacgaatctctgtaattcgaattcctggcgtatcatcgatatagatacttgcattggctagattcccttgagcaatggtatatttttgccactcctcatcagtcaattgacccgtacggatagaatgcgattccaccaaaccttctgccgccaacatacgatccactagactttccgcacccatttcgagtgaaaaaatagcaaccgttttgtccaacttagtcccaatgttctgagcaatattcaaggcaaaggctgtcttaccaaccgctggacgagctgctaagataattaactcctcctcatgaagaccagtagtcatatgatccaaatcacgatagcctgtcgcaatacctgtaatatcagtcgtttgttgagagcgagcctccagatttccaaagttgacattcaacacatctcgaatgttcttaaatccacttcgattagcattttcgctgacatcaatcaggcctttttctgcctgagcaatgatttcatcagctggttgcgaagcctcgtaagcttgattgacagactctgtcaacttggagattaatcgccgtaacatggccttctctgcaacgattttagcatagtactccgcattagcagaagttggaacagaattgacaatctcaaccaggtaagacaagccaccaatattctgtaaatcaccttgattatcaagaatggtacgaaccgttgttgcatctatagcatcgccacgatcggataaatcgaccatagcttggaaaatcaaacgatgggcatacttaaaaaagtcccgagactcaatatattctcgcacaaaaacaagcttactctcatcaataaagatagcccctaaaacggattgctcagctaagatatcttgaggttgtactcgtaactcttctacttctgccatcagacttcccttccttttacaatcttgtcaagaaggtgtaaatttatccttctttcacacgaagattgattacacttgtgatatcttgatagattttcactggcacatcaatcaaaccaactgctcgaatcggagcttgtacttggatatgacgtttatcaatcttaattccaaattgcttttgcaattcttctgcaattttcttattggtaatagaaccaaaagtacggccatctggaccaactttttcaacaaattctacaacagtttcttctgcttctagttgggatttaattgcttttgcttctgcaatcatctcagcatgagctttttcttcagatttttgtttaccacgaagttcacctacagcttgagcagtcgcttctttggctagattctttttgataagaaagttttgcgcataccctgttggtacttccttaatttcgccttttttaccttttcctttaacatctgctaaaaagattactttcattcttctttctccttttcctttatttcatttaatacaatttctgtcagtttttcacctgcttctgacaaggttgaatccttaatttgagctgctgccaaattaaagtggcctccacctcccagctcttccataatccgttgtacattcagcttactacgactgcgagctgagatagagataaatccttgtgtattcttcgcaagaacaaaactcgcttcaatacctgacatagctaacatggcatctgctgccttactaataacaactgtatcatagcatttcgagtccttagcctctgctattagtacatctgaacctaatttacgtccctgtaaaatcagttcattgacctcacgatattcttcaaaatctgttgcagccatttcctgaatagcaatactatcacttccgcgcgttctgagatagctagcaacatcaaatgtcctactagtcactcgtgatgtgaaatttttagtatccaacatcataccagccatcaagacacttgcttgcatacgactcaaacgatttttcttagaattctggaactgaatcaattccgttaccaactcactggcactacttgcaccactttcgatataagtgataactgcattgtctgggaaatcctgatcccttcgatggtggtcaatgacgatggtttgggtaaataaatcataaaaatcttttgataaagttaaagctgtctttgaatggtctacaagaatcaacaaagaacgattggtcaccatccccattgcatccttaacagacaacaactttgtaactccttctttttctaagaatgaaacagctcgttcaatatccggcgacatttgttcttcgtcataaatagcatagctattttcagtcacattgctggcaaacaactgcatacctacagcagagccaagagcatccatatctagatttttgtgaccaactacaaaaacctgatccacactacgaatcttatctgaaatagctgtcatcatagcgcgcgtacgtgtacgtgtacgcttgattgaggcagcagatccaccaccaaaataaactggatttttcgtttcgtcgttttccttgacaaccacttggtcgccaccacgcacttcagccaagttcaaattgagcaaagcaactttccctatctcatcatgatttccatcaccataagaaaatcccatacttaaggtcaagggcaactgtctctgtttcgactcttctctgaaagaatcaataacagaaaatttatcgttcatcaatccctcaagcaccgtgtagtccgtaaatagataaaagcgatccatacttactcgacgggagaacatggcatgtttaccagcaaattctgaaacaaaattggctacaaaactattgatatgactgatatcagactccgatgtttcatcttctaaatcatcatagttgtcaacagaaacaatcccaatcacaggtcgacttgtcactaactcaacagtcgcttcgtattctccagacacatcaaagaaataaagaactccagataccttgtccatatgaaccgaataacggatctcacccaaggtagcataagaacctggattccccacagaagcctttataattgtttgaattaatgcaacatcaatctcgcccacttcattagtcaaaatcaattcagcgtaaggattgaaccattcaacttcacctgacgataagtctagtttaataactccgacaggcatctgttctaacaaggttgtcaaactatcttcagcttggtggtttacatactggatttgttctacttcactctttgagtagtagtctctctgatggataaatagtaaaatatatgaacccaaaataagtagcaaaagaaatagcgttaccagtgtattcgttacaaaaacaagttgcacagatagcactccgaacgccactattcctaatattaaggggaaaataggacttacataaaattttttcattccaaacctcttggcacccattataccataataaccaccaaaaagcgactttttaaaagtgtaatcagtaattctatcaattataagaaaaaggaggtttacaattcagtaaaccttcctttacacatattgaaattaagattctttaacttctaacaagccaatctcgccatcttcacgacgataaatcacattggttgtctgatcttcaacatccacatagataaagaaatcatgtcccaacaaatccatctgtagaatagcttcttccaaatccattggttttaaatcaatttgttttgaacgaacaactctggattgggcaacatttgtatcttccaccaaagcatctgtaaataattgactagttgctaccttgtttttatttttacgctcgatttttgttttatttttacgaatctgacgttcaattttatcggttacaaggtcaattgaaccatacatatcttgagacacatcttctgcacgaagagtaattgagccaagcggaatcgtcacctccactttagccgttttttcacgatacaccttcaagttgactcgagcatccaactcttgttcagcttgaaaatacttttcgatcttttcgagtttagaaactacataatcacgaattgcttctgttacttctaggttttcaccacggatactatatttaatcatatgagtaccttctttctaaacatttttgtttttctgatttcattataacgctttcattttatttttgcaaattttttcctcatcttacaagggaaaatgtttttacatcctcagcacccgcttcttccaacagcttcttcacacgatttatagttgttccagtagtgtaaatatcatctataagtaggatttttttaggaatagtgactccacttttaataaagaaaggaaattctgtctccaaacgctctgagcgacttttagaagaactagctcgctcttctctcttttctaataaatccagatacgcaaaccctgctgcttcaactaaaccttcaacctggttaaatcccctctcgagcaatctttcaggacttaggggaattacaacaaattgatactctttgtacttttttaactcctcacttaaaactgaagcaaaaacttttcttaaaaggaagtctccatcaaacttataccgactgaaaaaatccttcatagcttgattgtaaataaaaatcgctctatgactgacctcaactccttctttacaccaaagttgacagtcttgacacttcattgacaaatctgttttcatacagtttgggcagttctcttctccaatcctctcaaaagtagaatcacaatctaaacaaagacaggaggcatcattcttcagaagtaaaagactactgaaagttaaaacagccttcatagtctgcccacataataaacacttcatagacccgcctccttattcatctgttgaatttccttaattgcctttttgattgaagtatttaacccgtcatggaagaaaagcaaatctcctgtcggtctgtccatactccgaccgacacgtcctccaatctgtattaaactagacttggtaaacagacgatgattggcctctactacgaaaacgtcaacacaagggaaggtaactccacgctccaatatcgtcgtactgataagtattgtcagttctctatctcgaaaagcttgtacctgctctaatcgattttctgtgatagaagatacaaagccaattttctcatttggaaattgctcctgtatgatttcttttaactgttcccctttcttaatctctgaagcaaaaatgagtaacggataacctgtctttctctgcttctcaatataagactttagctttggtgacaaccgacttttctctaaacagtgattaaaatcggataaccagacaggtttaggaataatcaaaggatttccatgaaatcgtcttggcaaactcaatcgttttaattctccgatgcgaaccttcctatctaactcatcggtagaagttgctgttaaaaagattctcaagccattctcctttacactattcttgacagcatggtaaagcataggattgtcaacataaggaaaggcatctacttcatccactatcagtaaatcaaaagcttgataaaacttcaataactgatgggtcgtcgcaacaactagtggtgttcgaaaatacggctctgattctccatgtaggagggctatctcacaagcaaaatccttttgcaggcgcttatacagctccaaacaaacgtctatgcgaggactggccaaacacactgcaccacccgcattgatcactttagctactacttgataaatcatttctgtctttccagctcctgttacagcgtgaaccaagcttggctcttgcttgtctaccgcttgaagcagtccctgtgataccttatcttgaaaaggggttaattgaccacgccatttaagaacatcttgcttcggaaaatcctcctgtgggaaatagtataaagattgatcactcctgactcgcttcatcagtaaacactccctacaatagtaagtaccgatgggcaaataccattcttctagaatagtactattacaacgttgacagaaaagtttccctttctcctttctcattgctggaagtttctccgccaactgacgttcctcttctgttaattcattctcagtaaacaagcgaccgagataatttggatttactttcatacttctttattcgtaaaaacctagcgctttaaatgattttttagtacaattaaatcatggaatttagaacaattaaagaggacggacaagtccaagaagaaatcaaaaaatcccgctttatctgtcatgccaagcgtgtttatagcgaagaagaggctcgtgacttcattactgccatcaagaaagagcactacaaagctactcataactgctctgccttcattattggggaacgtagtggaatcaaacggacaagtgatgatggtgagcccagtgggactgctggcgttcccatgcttggggtactagaaaatcacaatcttactaatgtctgtgtggtagtgacacgctactttggtggcattaaactaggcgctggaggattgattcgtgcttacgctggcagtgttgccttagctgtcaaagaaattggcatcattgaaataaaggaacaggctggcattgctattcaaatgtcttacgctcagtaccaagagtacagtaacttccttaaggaatataatctcatggaactggatacaaactttacagatcaagtcgatacgatgatttatgttgataaagaagaaaaagaaactattaaagctgcacttgtagagttttttaatggaaaagtcactttaactgatcaaggtttacgagaagttgaagttcctgtaaacttagtgtaaacaaaggagaaaaatatggcatttggtaaattcattcaaggactcgctggtaactttagcgagcaaaacaaagaaactcttatcaaagaatatggacaatatctactagaaaatgaagaaattcaaagtggatataaactgattcgtgattcaattatatttacaaatatccgtattatctttacagataaacaaggcgctactggtcgtaagatgtctattaaatcaatctttttgatgaacattgttaacgttgaaatggaaactgcaggagcaggtatagatgatagtgaaattactattacttatttagaaaatgtctttctaaaagcacacaatgagcattttaatgctcataaatttgaattccctaagaaaacggatatcattccactttacacctatttattagaattagcttatcacaatcgcttgaaaattaacggcttagacctgtgatataaaaaaatcctatcacttcgataggatttctatattttacaaatggtatagatagcgttatactagaaatatcttatacaaagaggtattcatatgtctatttataacaacattactgaattaatcggtcaaactccgattgttaaactcaacaacatcgtgccagaaggggctgcggacgtctatgtaaagcttgaagcattcaaccctggttcttctgtaaaagatcgtattgctcttagcatgattgaaaaagctgaacaagacggtattctgaaaccaggttctacaattgttgaagcaacaagtggaaacactggtattggactttcatgggtaggtgctgctaaagggtataaagtcgtcatcgttatgcctgaaactatgagtgtagaacgacgtaagattatccaagcttatggtgctgaactcgtcctaactcctggtagtgagggaatgaaaggcgctattgctaaagctcaagaaatcgctgctgaacgtgatggtttccttcctcttcaatttgacaatccagctaatccagaagtacacgaaagaacaacaggagctgaaatactagctgctttcggtaaagatggactagatgcctttgttgctggagtgggtaccggtggaacgatttctggtgtttctcatgcactcaaatcagcaaattctaacattcaagtttttgcagtagaggcagacgaatctgctattctatctggtgaaaaacctggaccacacaaaattcaaggtatctcagctggatttattcctgatacacttgatacaaatgcctatgatggtattgttcgtgtaacatcagacgatgcactagcactcggccgtgagattggtggaaaagaaggattccttgttggtatttcttcagctgcagctatctacggagccatcgaggttgccaagaaattaggtacaggtaaaaaagttcttgctctagcaccagataacggtgaacgttatctctctacagcactctatgaatttgaagtgtagtctcctaaatacacttagcccttattatagggctttttatttataccttaaaaataggaacatctccctataaaaatcgactgcatagaaaaaaggaagcaatttggcttcctttttattattagttattcaaggctgctgccattgtagctgcaacttcagcttcaaagtcgtttgcagctttctcgataccttcaccaacttcaaagcgagcgaactcaactactgaagcgttaactgattcaaggtatgcttcaactgtcttgctgtcatccatgatgtatacttgtgcaagaagtgtgtaagcttggtcaactttagtgttgtcaagcatgaagcgatccattttacctgggatgattttgtcccagattttttctggtttaccttctgcagccaactcagctttgatgtcagcttcagcttgagcaatcacttcatcagtcaattgagattttgatccatacttcaagtgtggaagagctggtttgttaaccattgcacggctttcattgtcttggtcgattacgtggttcaattgcgccaactcatctttaacgaattgctcatccaattctttgtaagaaagaactgttggtttcatcgctgcgatgtgcattgacaattgtttagcaagtgcttcgtctccaccttcaacaactgaaataacacctatacgtccaccgttatgttggtaagctccaaagtgttgtgcgtctgttttttcaatcaatgcgaagcgacggaatgagattttttctccgatagttgctgttgcagatacgtatgcagcttcaagagtttcacctgaaggcattgtcaaagcaagtgcttcttcattattaacaggttttccttcagcaataactttagctgtagtatttaccaattcaacgaattgagcgtttttcgcaacgaagtcagtttcagcgtttacttcaataactgctgcaacattaccgttaacataaacaccagtcaaaccttctgcagcaacacggtcagccttcttagctgccttagccatacctttttcacgaagcaattcaatcgctttttcgatgtcaccgtctgtttctacaagcgcttttttagcgtccataactccggcaccagatttttcacgcaactcttttacaagtttagctgtaatttctgccattttgattctcctatattttttaaaaataggagagccgggctaagccccgccctcctaggtaattactatttatatgaattaagcgttgtcgccttctacaacttcaacgatttcttcgattgaatctgcttgagcttctgaagctgcaaattctgcttcaactgctgctgcatcttcaccttgacgtccttcgatgatagcgtcagccaatttagctgtgatcaatttaacagcgcggatagcatcatcgttagctgggatgattacatcgatatcatctggatcagtatttgtgtcaaccatcgctacaactgggattcccaattttttagcttctttaacagcgatttgctctttgtgtgggtcaactacgtacatcacatctgggatacgaggcatatcttcgataccacccaagaatttttcaagacgtgcacgttgtttgttaagaagtgcaacttctttcttaggaagaacttcgaaagttccatcttcttccatacgtttgatttctttcaaacgagcgatacgtttttggattgttccccagtttgtaagagttccacccaaccaacggtggttgatgaagtattgacctgaacgtactgcttcttcagcaactgcatcagctgcttgtttcttagtaccaacaaacaatacaactgcatcgttagctgctgcatcacgcatgaaatcgtaagcttggtcagcgtattttacagtttgttgcaagtcgataacgtggattccgttacgctcagtgaagatgtacttagccatcttagggttccagcgacgagtttggtgaccaaagtgtacaccagcctcaagaagttgtttcattgaaattactgccatgagtatttctcctttttgtttttttcctcttcttgacttcaactcgcaaaacgacccaaaggcaactgtttcacaattcatcaagaatgagtattatcgttcacacgacaagtttcattttaccatactttttcaatattttcaagtgattttagcagatttttaaagtaaggtaactatatgaatcataaaagagactcaaatcgagcctcttcgttttattcattagtttggatagatatatgttacaaaaccttctgaagtcgtagtaggattgaaccatccacgtttatttccgattgtacggtttccaccatagtttgattcagatacttggatacttgttgatgatgaaacagctgtaaccacggctacgtgtccatatccaccatcattccaacatgcaatggcaccaacttgaggtgtagatcctgtacggaatcctgctgcagctgcacttgtagcccactgtgctccattaccccagtaatctccagcccaaggcgccaatgttttagctccccatgtacactcaccagttggataacttgaagcatttgtactatatgttggacgatgtgtcactggagcaggagtgtagcttgttgattctgttgaagcactgcttgaagatgattcagacgaacttgactcagatgaacttgatgaagaaatagtagatagtgcttgaacttgtgctgtaaaagttgtatttccagaagcaactactgtttgttgttgacttgcttgtttagctttataagctgcttctgcttctgctgcagctttagcttctgcttctgctgcagcttttttctcaagtaaacttgctttttcatcctctgcagtagccttttcagcagcaagattcaattctgcagctttcaactcagcttgttttgtagttaatgattgagcatcatcagctagtttttgctgatttgcaataactgtattaattgcatcattgtttgctacttgtttttcagaaatagcttttttatctgctttttgttgttccaacatcttgttgtttgcagatacgatttcactcattgcagcaacacgtgaaatagcttctgtaattgattttgagtttacaattgtattgatgtaatttgttgcagctccatttgtttgagcactacgagcttgtttttgcaatgaatcattgcgagatacaatattcttagaaagttctgtaatttcaccctcaagctttttagattctgcttgtagtctatcattttcagattgcaagtttgattgctctgtttgaatagcagacacttgctcctgaacttgatcaacttgtttttgggcttcttgttgttgtgctgttaagttactgattttattatcttgagcagcaattttgtcatcagtagtttctgcatgcgcagttgttaaaacagctacttgagaaaccattactgtacttaataaaagtgacgctaagatttttttcttcatattacgtagatactccttcttttaaagacattactagtataccaaaaaaaggcttaatgaatattacgcctttgttacatttttatttctttcttataggtaaaatttttcaaaaataaactgaaagataatcatccatataaggttcaaaatcattgatggtactaaactatagactataaataaagacatactatccacagttaaacctaccactaatgcaagtatataagctcccatctcaaatagaaaagtcatgacaataattgccaacattctcgtccaacgattcaataaaataacactattaaatttatggagaaatactcccaacaagacgaacaacaaagtcgcaatccctatcaagtggaaaaagtaaatgtcataaaccaaacccactacaaaacaataagctaaatagagatactctgatacttctatcgtctcaaataagagaaataaaaacagaaaatgactagccaaatgtacatgggggaaaaatgagcccagaagctggctaatatgggcgtcaattagaacaaagaaaggaagcaataaaaacactccaacccgcttcaactgtctcattatgaattccccactaattctatcacatccacattatgagtatctgcacttaatttaacagttacttctcgtgtcaagtagtccgtactatgcgttgtggcaaccacttcaccaacaggaatatcagcaacgttaaagtttcctaatccaccagtggtcaccttatctcctgcactaatatcgctactactatttaattgactaatttttagaacttcattttccttgtcatagccaacaataattccataaattgtagtagaaccatgttgaattttaacagaaatcttatcagcattttccgtatttgtcagaaggttgaccatggtagagttctcctctacttttgagacactcccaatcaagccaccatttgcaattgctaacatattctcagaagccccttttgatttgcctgcatctaaggtcaactcctgcttccaagataccggagatcgcataataacatctgctgccaaagtctttgtagcttgcaatttggacttcatatcaagcaattggcgcagttgttcattttccatctttaaactttccgcctcatttgatttaacttctaattggtaaatctgtttcttcaaactttcattttcattataagtgcgtgtcaaatgagccaaatctgatttgacagaatcaaaccactgaaaaggtttttgcacaaccctatcaaccactgagattccatctcctaatcttgtcacaattgtacttgaataagtcgtcgctaagagagctgacacaagcagaacagtgacaaaaacaataatgacatattttgattttttaaaacggttcatatccctacctttatatcaaaaactgttacagtaactttttatcaattcctgaaagctactaagattttaagaaaaataagcaacaaccaagtatgataataacaagaatggtcagcgtatcctttcgagtccatttcaattgtcgatattgacttctgccttttccaccctgataaccacgcgcttccattgcgatagccaaggaatccgcacgttttaaacttgtcgcaaaaagaggaatcaaaatgggaatcatagccttcaccttttgaacaatacttccttctccaaaatccactccacgcgctttctgtgcattcataatccgcgtcgtatcatccatcaaggttgggacaaaacgcaaactcatagacagcatcaatccaatttcatgaactggaactttcatactctttaaaggtgctaatagagcttcgacagctgatgccaaacttaagggcatggtcgttaaggttaacaaagtagaaaagaaaataatcaatacaaagcgacaaaagataattccagcttgttgcaaagcataatccgtgattctcacaaacgaaaactcaaataaaacattcccattagaaatgaaaaacagttgaaaaatagttgtgaaggcaatcaagaaaaacatagacttcaagccctgaataaaaaatgaaagagatactcctgacaaggcaataaagatccctgtcgctataaaaagaatcagattcgtcaagggattattagcccaaaaaacgatcaaaatcagtagcatcatagccagtaatttgctgcgtggatccaatcggtgaactatcgaatcccctgggatataacgccccaaaatcatactatccatttagcgactccttgaactcctctatcttaatcggtaatcgtttaaatgacacgcctctatcagccaatcgtttacaaaaagctgtaattttaggtactcccaactgaacttcttccataaaaacaacatcttgaaagacatcactaggtttaccaaacttaactaaacgtcccttttccatcacatatacctggttcgcatattcagcaacatcatccatcaaatgcgttaccaagacaatggtcatccctgactggtggagttttttgaacaaattcatcagctcttttcttcccaggggatctaggcctgctgtgggttcatctaagactaatatagctggttccatggcaagtatgcctgcaatggcgacacgtctcatttgtccacctgatagctcaaacggactacgatcaaaaagtgattcatcaattccaaccagagccagtttctcacgcgcaatctgctccgcatcttcttcagaaactccaaaattttgcggtccaaaagcaacatccttcaaaaccgtttcttcaaaaatctgattttcagcaaactgaaataccaagccaacctgttttctaatttgacgaatatctttatttttagaagtcgaggtgattaaggtatcaaaaacccgcacactcccttggcttggcaccaataaaccatctaatagttgtaaaatagttgatttaccactacctgtgtggccaattaaggccgtataagaaccatcttcaatcgtcaaagaaacatctgacaaagctgttgacgctaagggagtcccttcttgatacgtaaaactcacattttctagagcaattcccatagcttatcttctagctcactttctgtcaaataattttcaggcaaatcatagccattctggctcaaagaatgttttaattgattagcaaaaggatcgtctaatccaatttgatccaaatcatttcgagagaaaagctcccttggactactagttgattcaattgacccttttttcatgatcaacacacgatcactcatggcaacttcttccaaatcatgtgtaatggaaatgaccgtcatatcatagtctttccgaattccttttactgtctcaatcagttctctacgtccctcaggatccaacatactcgttgcttcatctaagattaaaatagctggtcttagggctacaacacctgcaatagccacacgttgcttttggccacctgatagacgcgctggctctctctttttaaagtccaacatgccaaccaaatccagagcttcttccactctctttttcatttcttgacgagaaagtccctgattttccaaaccaaaggcaacatcatcttcaacagtcgctccaacaaattgattgtctggattttgaaaaaccataccgatttgacgacgtatattccaaacattttcctcagtcagccgttggccatcaattacaatctctccggattctgcttccagtaagccatcaattaagcgaaccgtcgttgatttaccactaccattatgccctacaatcgaaagccattctccacgtttcacgtgaaacgtaatatccttcacatcgtaatattcctgactttccttatagcgaaaagaaagattttttacatcaattactgatttcatttcgaaccaaatgtccctttaaatacataggcactacccttgaaataatcatagccagagtagatagtgaaaaacaaggctacataaagtagaacttgaccaagcaaagtccaatgtaatagcaagaaaataatggcaaacatctgactaaaagttttaatttttccaggcattgctgctgctaaaactgttccaccagtttcaactaataaaagtcttaaacctgtcacagccaactcacgacagataatcactgcaacaatccaagctggagccattcctaactcaatcagcataataaaagccgacataactagtagcttatccgccataggatctgcaaatttaccaaaattactaaccacattccatttacgagctaaatatccatctaaatagtctgtaatactggcaatagtaaagataatagctgctaccatatgactctctatcgaatttcctactgttaaaataaagataaaaataggtataaagagaattcgacctattgttaagatatttggaatttgttcttttttcattcgtttttccttaatttttagtaaaggttacagcgatttttccagtctgagctgttaatttcgataaatcaacagtctgattgtctactgttaaggcaacacctttgacaacacctaaagtaattgtcacaggatttttagttgaaacgcttgtttccgcacttttattatccgatgataaagtcacaccaccctcaagatcactttctgaaacactaacccaacttctagcatctgacactgataattgcaattttgcagtttccttgctcgttttataagcaacttctactcgatttccttcacctgatacacttatagcaggttctatatttgaagaactactagatgagctactgcttgaagatggagttacagaactagtcgaacttattgcttggactacactataactagacgcagacgaacgctccggttgagtctggagataattccaaacataataagtcacaaaaatgacaatcgatagtgcaaaaagtataaaataaaataaaggtaaaaatgatgccttatttttcttacttgaacgtctcctacctgtcaactcgtcttcatcaacatctacttcctcataagtaatcatgctcccagaatcataagcatccaagacaattcgctcatcaagttcaactgcccacgcatactttctcaaaaaagaacgagtataaaatggactaggaagttgatcaaaatcatcagcttccattgcctccaacatatccaactgaatttctgtttttttatgtaattcttctaaagtcaacccttggttagttctagctaaacgtaaaacctcaccaattgtttttttcctcatacttgtcattccttctttctagtgtcgattatgataggttgctatgatggaaatattgtaaaatcaactatgtcaccatcatctattaaatggtgtccagcatcaaggacatcctctaaagtaatttcctgtaaaatctttggcaaatcaaagattgtctcaccttgtccaaaagcatcatattgcgttgcaataaattcaagagagttcatgctactgaaaaattctccaaacatctctctttttataatatctaaatgatcctctgtaatatctaaatcctttgtaaaattacgaatagcctttttaaactgatgagataaagcaactggctcttttgtatccattgtcaacataacaaaatgaaagcgacttgttacttcaacttcaagagataaggacgcatcaattttacctgattcatataacttttgaaaacgatccgaagtccaaccaaacatcattgcaaacaataattttaataaaatatgatgtcgatagcaatcatcctcagcaacatcttgtttacctctaacaccaatcgctagtttaggagaagatacttccattctcatactgtctgtttgctttacatcttttaaaacaaacttttctcttgctacttcctgaacatctaactcttccagttcttttctttcaaaatagtcctgtacttgatccacatcaaaattgccaactaaaaacagagacatgtttacaggtttgtaaaaccttgtgaaattttcttgcaaattagttagattaatttgggaaatggactcctcacttccaactatatcagttgctaaaggtgtaccaggatacaaattcgctaaagttgaaaagaataaacacgaatctggatcatcttgatacatttctcgttcttgctgaataatatcctgctctcttaaaatggaatcttcagtaaaatgtgctgatgtcaccaattcatcaagtaaatctacattctctaagagataatccgttgctgaaaaaagatagtttgtttttgtaaagcttgtaaaggcattgctatccgcacctagactcgtaaaagctgacatcaaatcgctagcatcttctctctcaaataatttatgttcaagaaaatgagcaattcctccaggatattcttttacatctccgtcaacttctgtgacaagcgtatctaccgaaccaaattgtacagttacactcccgtaaacctctttaaattcctttttaggcaaaagagcaactgtcaatccatttgacaaacgagttcgataaaccatttcttttacagctggatagtatttttcttcaaaaacaacctttgtcattctattccttccataaagtaaatcgcctgtagtttcacattattagctgctctacaaatatcatctttgtcaacttgctcgagttttgcaatccaacctttaaagtctgctgaagatttcccaagtaaagaattttgataagcacgttcaatcaatgaaccttgattatcttgagaaagtaacaaagatcgacgaatcatttccttggtctgctctaattcaagctctgtaaaatatcctttttttaaatcaagcagttgattattcatcattttacgagcctggttccgattttctcgatcgataccagcatacatcctcaagaacccactaaataaatcaagctgacttgaaatagtataagccaatccagcattttcacggacatttgtaaatagtttagagtgagcaaatccacccagtaaaccattcattacaatcatggataaatgttgctcatcaccatattcaacaggacaatgataacctaattccaaaatggattgtcccacatttttccgaaccataccttcctgaaggatattggaataaggttgacaatactgaaccttcacatctccttttcgacctttaaagccaaatgattctaatacattttgaatttcaacctcattaaaatcacctaggaaaaagaaatctattcgatcattggccaaaaattctttgaaacaagaataagaactttgtggagtttcagctaaaatacgatttcgtaaatcactgtattccaattggagacgttcatcatgaaaaaataatttatctaattctttatgtgcaaaataaaaagaatcatccatatcagctgctaaacttgctagcaattgttttttctcaatttcaaataaggccgaatcaaacccattatcaactacgacgggggaaaaaagagtttcttttactagttccaaaacctgagaagttagcacatttttcctacttaaaaactcatcacgaacataggtaaatgtcaattctacaatatgactttgccctcttctaaaacaattggttgacatatctgtaccatatagactggccaagtgtcttctcaaagcttgagaagtggggtacatctggttggacgtttctagcatactcgcactcaacatgcgacctgtaatcgtatcaagagataatggagaggtaaaacgcacggtaattttgttcgttttaaacttctttgattggataaaatgtgttgaaattccatgcactaactccatgatttacctcctcatatacagacttctattatatcacgaaaacctgaaattttcttgttccctgtaacacttttgaaataaaaatcgcttacatttctccctgtttctctcactatttttaggaaaatatggtataataccaaagattgaggtgaattatggaatacaaattatttgaagaatttattaccctccaagcactactcaaagaacttggaattacacatagcggaggagctatcaaatcatttctctctgaacattctgtttactttaatggggaattagagagtcgtcgtggtaaaaaacttcgcattggtgataaaattgacatacctgacatgaatattgacatcttattgacacaacctacttctgaggagcaagaggaatatcaagctgataaagttgaaaaagaacggatcgctaaacttgtcaaagagatgaataagggatttaaaagagacaaatcgaaacctacttcatcacctaaaagcaaacaagctccacgattccctggtagataatcatgtggctacaacacctatctctcaaaacttttcgtaactacaaagagacgaaaatagactttaatcctaaattaaatatctttttaggacgcaatgctcaaggaaaaacaaatatactagaggctatctattttttagccttaactcgtagtcatcgaactcgaacagataaaaatctcattcattttgatgaggaacaacttcatctttcaggtctagttcagaaaaaaactggatccattcccctagaaatagaactaacacaaaaaggccgtgtgacaaaagttaatcatttaaaacaggcacgcctttcagattatgtaggacacatgaatgttgtcttatttgctcctgaagatttacaactaattaaaggagcaccttcagttcgacgaaaatttattgatatggagcttgggcaaattaagccaatctatttatcagatttaaccaattataaccatattcttaagcaaagaaatacctatttaaaatcagctcaaaaaatagatgaaaccttcctttcagtactagatgatcagctagtcgattatggatgtcgtgtaatgaatcaccgcttagattttataaaaaaactagagcattttggtcgtaagaaacattttgaactttctaatcagattgaagagttgtcaatatcctatcaatcttctgtaaagtcaactgaaaaagaagacttatcagaatctttcaaaattgctttagaaaaaagtaggtccagagatttatttaaaaagaatactggtgttgggcctcatcgagatgacatttctttttatataaatgggatggatgctagtttcggaagtcaaggccaacatcgtagtctcgtcctctcgataaaattagcagaaatcgaattaatggaaagtattactacagaatctccgatattattacttgacgatgtcatgagtgaacttgacaacactagacagttaaaattattagaaacgatttctcagtcaatccaaacctttataacaacaacaagcttagatcatcttcaaaatttgccagaaaatctaagtatcttcactattcaggatggtaaagttgctgtaaatgaaaattgacaacattgtaaaagaactcctgtttttactggagttcttttcattgtttttttacatagaataatttggtgcctcattagtaatttgtacatcatgaggatggctttctttcaaaccagcaccagacatttcaataaattgagcattatcgtgtagctctttaaggttcgctgcaccaaagtaacccataccagagcgaataccaccaatcatttgaaagacaatatcagctgccgctcctttataagcaacacgaccttcaattccttctggaacaagtttgtttgcttcattgacagaaccttggaagtaacgatcacttgaaccttttttcatagcagcgattgatcccataccacggtaagtcttgaacttacgtccttggaagatttcagtttcacctggagcttcatcagttccagcaaacattgatccaagcataactgcatttccacctgcagcaagggcttttacaatatctccagaatacttgattccaccgtcggcaatgatcgttttaccatattcacgcgcaacagctgcagcatcgtagatagctgttacttgcggaacaccaacaccagcaatcacacgagtagtacagatagaacctggtccaatcccaaccttgacaacgtctacacctgcttcataaagggcacgtgcaccctcagctgttgcaatatttccagcaatcaaagtacgatctgggaagtgagcacgaatctcagcaattttacgcaagacacctgcagaatgaccatgtgcagtatcaataacaatcgcatccgctcctgcctcaaaaagagcctctgcacgttcaaatgtatctgaagtaacacctactgcacctgcaactagtagacgaccaaactcatctttagcagcatttggaaactcaataactttttcaatatctttgatagtaatcaaaccagaaagacggccttcttcatctaccaacggaagtttttcaatacggtgttcttgaagaatgctttcagccgttgcaagatctgtacctacaggagcagtaacaagattttcactggtcatatgatttgagattggttggttatagtctgaaataaaacgaagatctcggtttgtcaaaataccaaccaatttacgattttcaagtgtttcaacaactggaacaccactgatgcgataacgacccataagctcatctgcttcagcaattgtatgttcaggcgtcaagaagaacggatcaataataactccattttcagaacgttttaccttacgaacctcgtctgcttgttgagcaattgacatgtttttatggataactccgagaccacctgcacgagcaatagcaatggccatttgactctctgtaactgtgtccatggcagcggtaataattgggatatttaaagtcaaattatctgccaatttagttgttaaatcagcatcgttaggcaacacatgactttcagctggaataagcaatacatcatcaaaggtaaaaccttttttcaaaaatttagtgtcccaattagacattcgaagtttcctcttttctttctttttgagcttgactctttttatattgtatctatcataccattctataaaaatttgtcaaatattacaggggtaaataaaaaactatcttttctttgagatagaaatgatagtttcttgtaaaataaacttagttaaagtaattgagtcccattgcacctttaacctcagatagggtttgacctgctacttcacgcgctctttcactacctttttgaagcatattataaacttctcccatatccttagcaaattcgatacggcgctcacgaataggaccaagttcacgctctaatatttcaagtagataacgcttggtcttcacatcaccaagaccacctcgttgataatgttctttcatgtcagcaatttcttgagcatcttctggacgaccaaaaacatctagataatggaaaaccatatttccttcaattttacctggatcctcaacgcggatatgatctggatctgtatacatactcatcacttttttacgcaaagtatccgcatcatcagctaaataaataccattattgagtgatttagacattttagcatttccatctaaaccaggcaaacgccctgctctctcattttctggataaataccttccggttctaccaagacatcacagttatatgcattgttaaaagaacgaacaatttcacgagtctgctcaatcattggtttctgatctgtcccaacaggaacatagttggccttaaaggctgtgatgtcagctgcttgtgcaattggataaaccaaaaatcctgtcggaatgctttctccaaattccttctgagcaatttctgtcttgacagttggattgcgctccaaacgtgctaatgacactaaattcatataatacatagacaactcagctaattctggaatttggctttgaataaagatagttgatttacttggatccaatccaactgcaaggtaatccaaagctacatttccgatagactctacaatggtttgagggtctttagcatgatctgtcaaagcttgttggtcagccaagaacacaaacatatcatacttatcctcttcctgtaataatactcgatttttgagacttccaacataatgtccaatatgcaattttcctgttggacggtctcctgttaaaataatgggtttagtcattttgttctccttcgatatagtcccttcaattatagcatttttttaatgaaataaccgtaatttatcaaaataaatcagccttgctatttacggatttgtgtaaagtatgctgtaaatttaatttacacaaaattgatagataaaaatttgaatatttccgtattttctagtagaataaatatattacatatataggagaaaaacattgcttacagtatctgatgtttcactacgttttagtgatcgcaaactttttgatgatgtcaatatcaaatttacagaaggaaatacttacggattgatcggtgctaatggtgccggaaaatcaacctttttaaaaattttagctggagatatcgaacctactactggtcacatctctcttggtccagatgaacgtctctctgttcttcgtcaaaatcactttgactatgaagatgaacgtgccattgatgttgttatcatgggaaatgaaaaactttatagcatcatgaaagagaaagatgccatctacatgaaggaagatttctcagacgaagatggagtgcgtgctgccgaacttgaaggagagtttgccgagcttgggggatgggaagcagaaagtgaagcctctcaactccttcaaaacctaaatatcccagaagaattgcactatcaaaatatgagcgaattggccaacggtgaaaaagtaaaggttctcctcgccaaagcactttttggtaaaccagatgtccttcttttggacgagccgaccaatggtttggatatccaatcaattacatggctagaagacttcttgattgattttgataacaccgttatcgtagtatcacacgaccgtcacttcttaaacaaagtatgtactcacatggccgaccttgacttcggaaaaatcaaactctatgtcggaaactatgacttctggaaggaatcttctgaactcgctgctaaattgctagcagaccgtaatgctaaagcagaagaaaaaattaaacaattgcaagaattcgttgctcgtttctctgctaatgcttctaaatcaaggcaagcaacatcacgtaagaaaatgcttgataagattgaacttgaagaaattgtaccatctagtcgtaaatatccatttatcaactttaaagcggaacgtgagattggtaatgatctcttgacagtagaaaatctaactgtaaagattgatggtgagactattttagataatatcagctttatcttgcgtccaggtgataagacagcgcttattggacaaaatgacatccaaacgactgcattaattcgtgcaatcatgggggacattgactatgaaggaactgtcaagtggggagtaactactagccgttcttacttgccaaaagataactcggcagattttgcaggaggagagtcaatccttgactggttgcgtcaattcgcaagtaaagaagaagatgacaatactttcctacgtggcttcctcggccgtatgctcttctctggagatgaggttaacaaacctgtaaatgtcttgtcagggggagaaaaagttcgtgtcatgctttcaaaactcatgctcttaaaatcaaatgtccttgtacttgatgatccaaccaatcacttggacttggaatctatctcaagcttgaatgatggattgaaaaactttaaagaatcaatcatctttgccagccatgaccacgagtttattcaaactctagccaaccatatcattgtcttgtctaaaaatggcgtcattgaccgtatcgatgaaacctatgatgaattcctagagaatgcagaagtacaagcaaaagttaaagaactttggaaagactaaaaaaattcaaaactcagttgggttaaccagctgagttttctaacattttatgaggtaacatgaaattattttttaaaacatattggacctattttgtttctttcatcattcccataatcattatgataggagtatatctatctcaaggtatctactggaatagcgatacatctccactattaggagatgggtttcatcaatacgttatttttgatatagctctaagaaatatcctacacggaaatggtagtttgttctacacctttacaagtggcctcggattgaatttctatgccctatctagttattacttgggtagtttcctttcaccactagtttacttttttgatctaactaatatgccagatgctgtctatctgacaactctcttaaaatttggattgattggactgtcaacttactttagtttaaataaattatttcaatcgattcctaatcctttaaaactagctttatctacttcctatgctctgatgagtttcactgtcagtcaattagagataaaaacctggctagatgtttttatcttgattcctttaattataactggtttacagatactcatcactaaaaagaaattcctattgtactttacaagtctgtcaatcttatttatccaaaactattattttggctatatgacagcattgtttcttattttctggtatctctgtcaaatttcttgggactttaaaacccgaaaatcatcttttcttgatttcataatcacctctgttttagctggtatggctagtttgattctgattcttcctactctgtttgatttacagacacatggggaaaaattgactgaagttacaaagtttcaaactgaaagtagctggtatcttgatctttttgctaagcaattcatcggttcctttgatacaacaaagtatggggccatcccaatgatttttgttggactacttccctttattttgaccattttattttttacgctgaaatctattaagtttcatgtgaaacttatctatgcaatcttctttacatttctaattgcaagcttttatattgaagttcttgatttattttggcaaggcatgcatactccaaacatgtttttacatcgctatgcttggattttctctaccttgttaatttacacagcagcggaagtcttaaatcgtctgaaagaaattaaaatctggaattttttagtttcgctttttcttatagtaacaggatttttagctaccatctatctaaaatcgcattattcttttttaacagatttgaatattctgcttactcttgaatttttggttgtctattcgcttttactccttgcagttatcaaaaagtttatctctgtaaatctatttgccattctaatctctttatttataatggttgaaatgagtttaaatgcttcatctcaaatggacggaattgctaaagaatggggttttgcttctcgaagttcatataatcgagatatcccagctatggaatctttctcaacagatattggaaatcaatttactcgtactgaaaaactacaaactcagacaggaaatgacagtatgaaattcaactacaatggaatctctcaattttcatctgttcgaaatcgttcagcaagctctactttggataaacttgggtttaaatcctctgggactaatctcaatctccgctatgcaaataatagtattttggctgatagtttatttggtatccagtacaatatctcagacaaccctattgataagtatggttttaaagatatctatcaaaaagataatcttgccctatatgaaaatcaattctctcttccgattgcatttgctagtcaatttgtttacaatgatgtcaagttcaatgaacatactttagataatcaagcctcgtttttaaatcaacttgctaacgtcgattttgattatttttctccaatcctttatgaaaaaaccgaaaatactgatgatttgattagtgttacaagttcttcaaatgaggatgcagcaatccagtatcaaattgaagtgccagaaaacagccaagtttatctttctttcacaaaccttcacttttctaatgataaacaaaagaaggttgacatccttgtaaatagtgaaaaaaagacttttacaactgataatgccttctccttctttaatctaggatatacaaaagagaaaaaaactttcaatatcaatgttagtttccctggaaattcacaagtatcatttgaatctcctaccttctatcgtttagatacccaaactttaactgaggctattcaaaaaatcaaagaacaacctgtaacagtatcaacttctaaaaacaaggtttttgctacatatgatgtccaacaagatacatctattttcttcaccattccttatgacaaaggttggtctgcctaccaagatggtaagaaaatagaaattaaacaagctcaaactggatttatgaaagttgacgttcccaaggggaaaggaactattacactttccttcattcccaatggttttattactggagcaatctgttcctttacttctctcttactatttggaatctataatcacagacaaaagtcatctaaggcataaaaaatcgaccagttggtcgatttttttaatcttcttccattttcttaggctgataggctagcatacctaaaccaataaatagtactagtatcacagaaaggaaaatgacttgatgatgaatatttcctgtcatagagattgtttctcgtaatccagaaactgaataactcattggtaaccaaggattaatggctctaaagaaatcatttgtcaaagcaagtgggtaagtacctgcacttgatgctaactgtaataaaagcaaaataagagaaaagaaagctcctatacggctattccatgttgttaaagcggtcaccatggacatgaatactaaacttgttaggataatgagaataaatgttctcatctcatgatttgcagttaaaccaataagatgaactcctccatataccaaaattcctgccaaaacagctataataccatttatttctgctcgagatttcaaccaagcccaacgactctccggatgacgtcctgaaggcagcttcgcaaagatcatatttgttgatattgctgcaacaaaaagagcaactgatatcatataaggagccattgcaactccatttacaggaacttgatcattgtctgttttggaaagactgagaggatttgataaaatctctgcatttttagattccgtagatgctgatttgagttgatcactggcattactcaatccttgtcctaaagaagcaactcctgtctgtaaaccttccaagccagaagttaactttgttccaccttctgctagtttcccagctccatttgccaatttattagctccactttctaattgagaagcacctgaaattaactgactggatttgtcagctagttggctagagcctgattgcaatttatcaactcctgctatcaattcttgactcttttgattcaattggttagagccagttgataatttttcaataccagacactaattctggagttttttcaactaattgaccaactcctgctgtcaagttagaagatttttgtgtcaaggtagttgagcctgaaactaattggtccaaactacctgtcaaggtggaattcttttcacttagttgacttgcgccttgagaaactttatcaacacctgcagtatatgcatttacacctgatgtaatagactgactggcaggaactaatttgctagcaacagctccttgtatctctgttaatccacttgacaattctgtcaaagaactagaagcgataggtaatacttgattagcttgattttttaaagtcgaaagattaaaagactgattttgtaagttttccaaacttccctgtaaaccttgagctaaagctacaattgactgagccgattgaatactatcagtcgaattttgagatacagaagcgcttatctcagcttgttgctcacttgtcaatgattgataagctgctgtcgattgaatattggctaatgtagtcgctttatcagactgaacacttgctaacatttgattagaaagagatactatacttgataaaacagaatctaattgttttgtatctccaacatcaatattttgaatagcttgatttaactgattcaaaccagaagataatttattaatttgatctttttgctcagacgaagtatctaacttgctagaaagttgttgaatcccttcacttaattgctccacacccattcgaagtgtagctgattgattagataactgattagcacctgttgcaagatttcccactccatttgtataggcactaacaccagatgaaaattgattaagaccagcattgagcttagaaacaccgccagtataagattctacaccagtatataattgattaattcccctcactaattcagggcttttagaagataattgacctaacccactatctaattgactcactgcaccagtatatgtaactaaaccactattaaaattccctaagccaagatgaagttgttcaacaccagagacataagaggataatcctttagtaaactgctccgttccatttgaaaatgttaaacttgaagctgctaaagagtttaggttaatagttaatgtttgacttcctgccactaactgattcgctccatcagttagtttttcacttccagaagctgcttgactcataccatcctttaaatcgaccattttgttgaataaagctttagtataggtctcggttacattggtagaaacactctgctttaattgtgtcattgcagaatcactcatcttgctggcaataaagctatgaccacttgaagtctgataatcgatttgcatttgctcagggtgatccgttaaaatagaagctgctttttcagacaagtcacttggcaaagtgactaccatataataatcaccgttttctagacccttcttaccttcttcttcatctacaaaatgaaaatccaatgatttattttgctctaaattagacaccatgtcttttcctatagacatgctattaccattataagaggcctctttatcattattgacaactgccacaggtaagtcagacacttgaccatatggatcccacattgaggataaaaatatgatattgtacagagcgggaataagagaaattcctatcatgacaataataaaggttggttttttaaaaattgctttccattctttaaacatagtttctccttttttaaacatattgtctaaaattttgatataatagattatacattaaaaaatctaaattacaagataaaaaatccatttttagacatatagtctaatttgtttacaaggaggaaatatgcaagaaagtaacaaacgcttaaaaacaaagcgaactattgaaaatgctatggtacaattactcatggaacagccatttgatcaaatttctactgtcaagctagcagaaaaagctggaattagtcgttccagcttctatactcactataaggataagtatgatatgattgagcactatcaaagcaagctatttcatacatttgaatatatttttcaaaaacatgctcatcacaaaagagatgctattctagaagtatttgaatatctagagtcagaaccacttctagctgcccttctttctgaaaatgggactaaagaaatccaaaatttcttaagaaataaacttcatatcatgctcagtacagatttacaaaaacgatttatacaactgaatctcaataccactgaattagaatacagtagcatctatctaactcacgcactttttggtgtttgccaaacttggattgcacatggaaaaaaagaaagtcctcaagaaataacagacttcctcatgaagatgcttggtgatacgaattgatgcaaaaaagggaacaacactgtgttcccttttatctatactccgccagtaggactcgaacctacgacatcatgattaacagtcatgcgctactaccaactgagctatggcggataaaatagtccgtacgggattcgaacccgtgttaccgccgtgaaaaggcggtgtcttaaccccttgaccaacggaccttctatctgtagcagatataaccattatatcaatttcttactaattgtcaatcacttttgagattttttctctagaatatcttttaattttctaatttttaatcttgaaataggacaacgatggtcttcatagaaaacaatttctaagttttttcgatcaatttctctgatattgcctatatttaccaaaaatgacttatgaggagaataaaatcgctgagtatgtttgtccttttcctgaatatctgtcatggtaccgtaaaactctttggcaaaattcttaccaataatgcgtaatttatgagagacacctgtcgtttcaatatacaaaatatcatggtaaggaatttttaaatcatttcccttgtaattgtagtcaaaataatctacaacatcttcattttcaagtaacatactcttcgtgtagaagatattttgctcaattctcttcttaaacaactcatcattgatatccttatcaacaaaatctaaggctgatacctggtatttataggttagagtcgcaaactctgatcgactggtgataaagacgataatagcgtaaggattgtgatgacgaataaactgagcaacttcaaacccttttttctcaattccatgaatatcaatatctagaaaataaagctggtttacttcatcattttcgatatattccttaaactcacgaacttttcccgttgtcttgtatgatattggaatattcgattctttcgaaatttcatccaatattctctctagtctcacttgatgttcaataacatcttctaaaattaaaactttcattcaaattccctcttaaacctaataatttgtctaaatgtactgccttccatctctgtttctaaaataatattgttgtatttatctagtagttctttcacattatttaagcctactccgcgatttcttcccttagtggagaatcctaaggcaaatagatctcctgaaggagtcatcgtcattttacatgaattctgaatcacaataactgtttcggtttccatcttaataactgctacttccatttgttttttatagctatcagctgatccttctacagcattgttcaataaaacactcatgatacgaaccaaatccaatagttcaattgggagcttggtaatcttatcttttacttccagtgtaaactctacaccattatttcgagcatagacaattgactgagcaaccaaacttcgtaaagctgaatcttctatgttgttcaagtcaaagtaagtatacttatctgaacgcagtttgtgatttgctttgaccaaaacttcattgtaaactctgtcaatttcctgtaaatcaccactatcaattgccatctgcatgctgacaagcatcccggcatagtcatgtcgaaaaccacggatttcattatacagtccgacaatttcatctgtataattctgtaaatgtttctgttcaaatttcttctgcttcaaagcaatctctttctccattttttctttatgcgaattcattgcaaaaaaggtcaaaagtaaagagataaagacaatagatgataaaatacttccaaaactattcaaatgtttaatcgtacttaccatatctgaaatgaaagatacaacatgtagaagtagtaaagcaaaaaagacttttttcaagaaaggatagagataatctttgtcaaaatagtttagttccaaatggaaataacgaatgattgttacgataacaacataagtcaacgccactacaactaaaaagaatagactatgatattgtagggcagtatcatctcctattatagaggataaagttacggatagaaaggtatgagtgctattatataaaagggatagtagtaaacttaagaatactcctctatacttctcatactttttaataaatctaaaatatgaatataataccaaaggaaataaaaatttttcaattcctaatccatctaagtatataaaataaaaggaaagttcaaatactgattctactaggaatgtataaccaccaaaaaagcatagttcttttatatttattttatttttacatattaaatagtaacttttactaataataaaaatatgtaatatcacaactaatactgcaagaaaatccattattccactcctttatcttcttttaaagaaattaaagaaaatattatgtgtttgccttatctccccaccttgaatattttgcaagtctttttccttcaattctacaaacttatctaaattaactgtgtttttcataataaaatctcctaaaatgtttttttcttgtaaactaacttacaaaaactattatacaaaatggaatttcgttttagataaaattctctcaactgtcatttttttctccccaagtgtacttttttaagaaaaaagccgggaaaattcccagctttgctactatattgatcccagcaggattcgaacctgcgaccgttcgcttagaaggcgaatgctctatccagctgagctatgagacctaatacagctattctaccaaaaattcaattgaaagtcaattttctatttatgatagggcgagccctgctgtattgtaaaagctcgatagatttgttcaacaaggactagtctcattaactgatggggcaaggttaaacgaccaaaactaacagagagattggctctcttttttacatcctgtgctagtcccagactccctccaataataaatgtaagagtagaaaatccttttatagaagcttcttctaattgtttactaaattcttctgaggagaaagttttcccttcgatagccaacacaatcacgaaatcacggtcaccaacttttgataaaattctctgaccttctatttctaaaatcttttgattttctgattcactggccttatctggtgttttttcatctgccagctctatcatttcaagcttagcaaatcgagaaattcgttttgaatactctgcaataccatcttttaaatacttttctttcagtttcccaactgttacaactttaattttcatgactctattctaacatattctctattttttcacatcttattcacaaaataaaaggttaattttagccgagaaaaccacagattttttaaagttatccacaatctgtgtaaaacttttgtgtttaagttataattaagctagtcagtttatactttcagtaattcaaaaatatggaggcaaatatgaaacatttaaaaacattttacaaaaaagggtttcaattattagtcgttatcgtcattagcttttttagtggagccttgggtagcttttcaataaaccaactaactcaaaaaagtactgaaagtacctctaacaacaatagtactattacacagactgcctataagaatgaaaattcaacaacacaggctgttaacaaagtaaaagatgccgttgtttctgttattacttattcagcaaacagacaaaatagcgtatttggtaatgatgatactgacacagattctcagcaaatctctagtgaaggatctggggttatttataaaaagaatgataaagaagcttacatcgtcaccaacaatcacgttataaatggtgccagcaaagtagatattcgtttgtcagatggaactaaagtacctggagaaatcgtcggagctgatactttctctgatattgctgtcgtcaaaatctcttcagaaaaagtgacaacagtagctgaatttggtgattctagcaagttaaccgtaggagaaactgctattgccatcggtagcccattaggttctgaatatgctaatactgtcactcaaggtatcgtatctagtcttaatcgaaatgtatctttaaaatctgaagatggacaagccatttctacaaaagccatccaaactgatactgctattaacccaggtaactctggtggcccactaatcaatattcaaggacaggttatcggaattacctcaagtaaaattgccacaaatggaggaacatctgtagaaggtcttggttttgcaatccctgcaaatgatgctatcaatattattgaacagttggaaaagaacggaaaagttactcgtccagctttgggaattcaaatggtcaatctctcaaatattaatacaagtgatattagaagactgaatattccaagcaatgtaacatctggtgtagttgttcgttctgtgcaaagtaatatgcctgccaatggtcaccttgaaaaatacgatgttattacaaaagtagatgacaaggaaattgcttcatcaacagacttacaaagtgctctttacaatcattctatcggagataccattaaaataacttactatcgtaacggtaaagaagaaactacatctattaaacttgacaagagttcaggtgatttagaatcttaattgacatctatgtaaagaaagctttacataagataaaagatgtgttagtgtagaatcatggaaaaatttgaaatgatttctatcacagatatacagaaaaatccctatcaacctcgaaaagaatttgatggagaaaaactacatgaactagcacagtctatcaaagaaaatggggtcattcaaccgattattgttcgtcaatctcctgttattggttatgaaatccttgcaggagagagacgctatcgggcttcacttttagctggtctaaggtatatcccagctgttgttaaacagctttcagatcaagagatgatggtccagtccatcattgaaaatttgcaaagagaaaatttaaatccaatagaagaagcacgcgcctatgaatctcttgtagagaaaggatttacccatgctgaaattgcagataaaatgggcaagtctcgtccttatatcagcaactctattcgcttgctgtccttgccagaacagatcctttcagaagtagaaaatggccaactatcacaagcccatgcgcgttcgctagttgggttgaataaggaacaacaagactatttctttcaacgaattatagaagaagacatttctgtaaggaagttagaagctcttctgacagagaaaaaacaaaagaaactgcaaaaaaatgattatttcatacaaaatgaagaagaacagttaaaaaaaatactcggattagatgtagaaatcaaactgtctaaaaaagatagtggaaaaatcattattgctttctcaaaccaagaagaatacagtagaattatcaacagcctgaaataaggctgttcttttattt

SEQ ID NO: 73 - DNA, 2436 bp, Streptococcus mitis NCTC 12261 contig19
caaattttttctaaaaatagcttgacagattaaatttttaggagtaaactgtttaccagttaattaaatagttaaggggttatctatgaagaaaaaaagtttatttttagtattgttaagtatctttcttttgtgtttaggtgcttgtggtcaaaaggaaagccagtcaggtaaagggatgaaaattgtaactagtttttatcctatctatgctatggtcaaggaagtatctggtgatttgaatgatgttcgaatgattcagtcaagtagtggaattcactcctttgaaccttcggcaaatgacatcgcggccatctatgatgcagatgtctttgtttaccattcgcatacgcttgaatcttgggcaggaagtctggatcccaatctaaaaaaatctaaagtgaaggttttagaggcttcagagggaatgactttagaccgcgtcccagggctagaagatgtggaagcaggggatggagttgatgaaaaaacgctctatgatcctcatacttggctagatcctgaaaaagctggagaagaagcccaaattattgctgataaactttcagaggttgatagtgagcataaagagacttatcagaaaaatgcgcaagcctttatcaaaaaagctcaagaattgactaagaaattccagcctagatttgaaaaagcgagtcagaaaacctttgtaacacaacatacagccttttcttatctagcgaagcgatttggactcaatcaacttggaatcgctggtatctctcctgaacaggaaccaagtccaagacaactaacagaaattcaggaatttgttaagacctataaggttaagacgatttttacagaaagtaatgcttcttcaaaagtagctgaaactcttgtcaaatcaacaggtgtggggcttaaaactctgaatcctttagaggcagacccacaaaatgacaagacttatctcgaaaatcttgaagaaaatatgagtgttttagcagaagaattgaaatgaggaaagaatgaaaatcaataaaaaatatgtagcgggttcagtggcagttcttgccctaagtgtttgttcctatgaacttggtcgttaccaagctggtcaagttaagaaagattctaatcgagtagcttatatagatggtgatcaggctggtcaaaaagcagagaacttgacaccagatgaagtcagtaagagagagggaatcaacgccgaacaaattgttatcaagattacggatcaaggttatgtgacctctcatggagatcattatcattactataatggcaaggttccttttgacgctatcatcagtgaagaactgctgatgaaagatccgaattatcagttgaaggattcagacattgtcaatgaaatcaagggtggttatgtgattaaggtagacgggaaatactatgtttacctcaaggatgccgcccatgcggacaatattcgtacaaaagaagagattaaacgtcagaagcaggaacatagtagtaatcacgggggtgcttctaatgatcaggcagtagttgcagccagagctcaaggacgctatacaacggatgatggttatatctttaatgcctctgatatcattgaggatacgggtgatgcctatatcgttcctcatggcaatcacttccactatattccgaagagtgatttgtctgccagcgaattagctgctgcccaagccttcttatctggaaaaggtgatcaattaagtacagttgaatatcgttcaagcagagctgaaacaagatctagtgtgagaacaagtcaatatgagtctcctcaaaatcctgcagcagctcctgagagtcaaaatgaggatttggatagtctcctccaagaattgtacgctttgccacttagccaacgtcatgtggagtctgatggattagtatttgacccagcacagattacaaaacgtactgccaatggtgtggcagttcctcacggagatcatttccatttcattccttattcgcaaatgtctgctttggaagaaaaattggctcgaaatctaccaattggaggtcagccagttcaaagtcattctaataatacgaaaccaagcagtcctgagagaacaagttcaacaccaagttcaaccattaaaccaaactttaatctcaatacgccggcaccgaatcgaggaactggaggagcttatacaacggatgatgggtatgtctttagtccgacagatgtgattgaagatacaggtgacgcttttgttgtaccgcatggaaatcatttccactatattcctaagagtgatttgtcagcaggagaattggctgctgctcaagcctattggaatgggaagcagggctcacattctgccacaagctcaagtaaaccaagtagtgataatgctaaaccagcccaaccaagtttgacagagactccaaacctgactgtcacaccaa

SEQ ID NO: 74 - DNA, 8218 bp, Streptococcus mitis NCTC 12261 contig20
cgaatggcattgctttacgcaattctgcaccaactttttcaatttcaaggttagctgcttgttcacggtaagcagtcaattttggacgtccagctttatagtcatttacaaagtcatttgcaaatttaccattttggatatctgccaagacagccttcatattttcttttacttgttcagtgattacacgtggacctgatacatagtcaccgtattcagcagtgtttgaaatagattgacgcattttcttgaatccaccttcgtagatcaagtcaacgatcaatttcatttcgtgaagaacttcaaagtaagccaattctggggcgtagcctgcttctgtcaagacttcgaaaccagcttcgataagggcagtcaaaccaccgcaaagtacagcttgttcaccaaacaaatcttcttcagtttcttctttgtaagttgtttcaagaagacctacacgagctgctccaacacctttacaccagtccatagcaatgtttttcgcatttcctgttgcatcttggtaaactgcataaagagctggaacaccaaatccttcttcataagtacgacgtaccaagtgtcctggtcctttaggagcacacatgaagacatctacatctgcaggaactttgataaattcaaagtggatgttgaaaccatgggcaaacccaactgcatttccagcttccaagtttggagcgatttctgcttcgtacaattcttgttggatttcgtctggtgccaaaatcatgataacgtcagccaatttagttgcttctgctactgtgtaagtgtcaaatccatcttcttttgctttgtcaaaagatttacctggacgtacaccgatgatgacatcgcgacctgagtcacgcaagttttgagcatgcgcatgtccttgtgaaccataaccgataacggcgatttttttaccgtcaagtgctgctactttaacatctttttcgtattccatttgaactgccatagtttttctctcttttctattatttattgccttttaggctggtttaacaaatttaagttggattgttaatcgcgggtaaatccagttgcacccgtacgagcgatattgcgaataccgtatggtcgaatgactcgcaatagagcttcgctcttttcagcatttcctgtcatttgaatagtaatcgagcttggcgctacgtctaccaccgttgcacggaaaggttgaataattgctagaatctcagctcgcttctcagctggcgctgacatcttaaccaaaatcacctcgcgctccaagtgtggtttatctgtaatatctctaatgcgaatcacatcaatttgacgattaagctgtttgataatttgctccacctcatcatgagaagctacatcaataataatggtgatacgcgatacattcggatcttctgttgctccaacagagatactttcgatattaacctgacgacgagacaggacaccggtaaagcgattgaggactcctgatcgattttgtagttttgctgttaacattctacgcatggaacttcacccccaacatctcatgattgctcttaccagctggtaccattggtaacacctgttccttacgagaaatatctacctcgattagcatcggaacatcctcagtgatgacttcaagatcttgagccaaggtctcaggattgtcaaatttatagtttttaataccgtaagcttgtgccatcaattggaaatctggaagggtatcaaagactgactctgatgttctaccttcatagaaggattcctgccactggcggaccattccaagtgagtggttgttcagcataaccaccttgattggcaccttgtaaatattcaaaatagccaattcttggttggtcatttggaaaccaccatccccaacgaacaagactacttccttatctgggttagcaattttagcaccgattgctgctggaattccaaatcccatcgttcccaaaccacctgaagtcactaactgacgttcattttggtaaggatagtactgagctgtccacatttggtgttgaccaacgtctgttaccacaatggcatcaccattcgtcaactcaccgatgcgttcaataacggcctgaggttgaaccacacgttctttcttatcataagaacgaacacggttcttgtctttagtaactttctcaatccatttctcagtattgttatgaactgtcggttctgctagcaacatttgcaaggctttcttagcatctccaactacaggaatatccgcactgataatcttgccaatctcagctgggtcaatatcaatgtgagcaaccttagcattcttagcgaaggtcttaggattccccgtcaagcgatcatcgaaacgacaaccaatactaatcataaagtccgcttccgtcatggcaatattagctgcgaatgacccgtgcatgcctcccattccaaggaagagtggatgactcgttgcaatcgttccttgtcccaaaagactggttaccaccgggatttgatagcgttctgcaaattcatttaattctgcagctgcttcagcataactaatccccccaccagctaacaagactggttttttagccttggacaattgcttcaaaattttcttgatttgcatatcattcggctcaagagtcggttgatagcttggtaggttcacttctggtgaatagatgaagtcggtttctaaagcagatacgtctttaggtaggtcaatgacaactggccctggtcgacctgtagttgcgatatggacagcttccgtaatgattcgagggatatcagctgtctcccgaacttggtaattgtacttagtgattggcatggtaattcccacaatgtctgcctcctggaaggcatccttcccaatccctgctcgcgccacctgacctgtaaagaccaaaaggggaacactatcgctcatggcatccgcaatccctgtaatagcatttgttgctcccggtccgctagtgacgacggcaacacccaactttccagttgatttggcataaccttcagcttcatgcaaacaaccttgctcatggcgtcctagaatgtggcgaatgcctttaaaattatatatcgcatcatacaaaggcaagactgcaccaccaggataaccaaagatggtatcaattcctaaatcacgaagtgtttccaaaactaggtccgaccccgtcttaggagattctaaactgattttctccattgttcccctttctcttctcttaaaaataacttgttactatcataccattttttcaaaatttttcaagagaaaagaagaaattttctgaattttctattttaacgtttatttatgaatgttatttttgtttttattaaaaagataccgatttcatttactaaaaaagaaaaaagaactgatttctcagttcttcattaatcttattccacactaaataggtatgggtaaactggttgttggccttggtgaatctctacctcaacatcttcgaattcttctgcgatttcttgggcaatttcattggcaagttcttcgcttccgtcttcaccgacatagaaggttacgatttcactatcttcatccaacatatgtttcaaggtttcagtcaaggtttggtgaatgtcagggtttgacacgaggattttcccatccaccataccaagattatcgttttcatggatttctaaaccatcgattgttgtatcacgcacagctgttgtgacgcttccgctaacgacatcgctaagagcagcagtcatacgctcttggttttcttcgatggacttgcttgggtcaaaggcgagaagacttgtcaaaccttgtggcaaagtacgagcttccaccactactgctggttgctccaaaacttctgctgcagattgagcggccataaagatattcttgttgtttggcaggaagatgatgttacgagcgttgacctgttcaacagccttgataaagtcttctgttgaagggttcatagtttgaccgccctcgataacataatccacaccttgagaacggaagatatctgcgagacctttaccagccaccacagcaattaaagcatactctttttcttcagcaggcttgctaacttgagcagcttctttctcaacctgtgcttcgtgttggttacgcatattgtcaactttcaccttgaccaagctaccatatttgagaccctcttgcataacaagtcctggatcttctgtatggacatggactttgacaatttcatcatcattgacaacaaggagagagtctccaagcacattcaagtaattacggaattcatcgtagtcaaaatctttggcataggttgggccttgcttaagagctaccatgatttcagtacagtaaccaaaggtgatgtcctcagttgctacatgaccagctacagacttgtggtgctctgcattgatcatttcactcatgttagccggagtcgctacaaagtcctcagatgcaatatattcaccagtaagggctgaaaggaaaccttcatagataaagaccagtccttgaccacctgaatccacaacgccaacttctttcaatactggaagcatgtctggtgttttagctagagctgttttagcaccttccaaggctgcgcgcatgacttcaacagcatcatctgtttgctcagcttttttcttagcaccgatagcagccccacgagaaactgtcaaaatcgttccttcaactggcttcattactgccttataggcaacttccacacctgattggaaggcaagggccaagtcttgacctgttaactcgtctttatccttgatggcttgtgaaaatccacggaaaagctgagacgtaataactcctgagttcccacgcgctcccatcaaaagacctttggcaagaatgctcgctacctctccaactgtagaagctggcttgtctgcaacttctttagcaccattttcaatggtcattcccatatttgtcccggtatctccatctggaacggggaagacgtttaatgaattgacatattcagcttgcttattcaagcgagttgatgcagcttgcaccatttcttgaaataagctagtagtaatttttgacacggttattctcctacaactttgatattttgaatgtagacatttacagtctgagcagtaattccaagttggttttccaaactaaaacgaacacgctcttgaatgttttttgacacttcgctaatctttgttccgtagctcaacacggtatatacatcaactgcaatactgccatcttcggctgcctttacgacgacacctttggaataattttccttacctagaagggcttggaaattatctttgagggcatttttactagccataccgaccacaccaaaaatctcagttgctgctccacctacgacggttgcaatcacttcatctgttagttcgatttgaccatcttttgtattaatttttacagtcatcctttttacctcaactagttgatactctattttatcatatttcagcccaagtgtaaaagcagaatactgtatcagcggatatttactctatttttcaaatgattttatatctacagtaaaagaaaaaagaccctaaggtctccttacttttattattaaacgcgttcaactttacctgatttcaaagcacgagctgaagcccaaacttttttaggtttaccatcgataagaacagtaactttttgaaggtttggttttacggcacgttttgtttggttcatcgcgtgtgaacggttgtttcctgatacagtcttacgacctgtaaagtaacatactttagccatttgtgttttcctcctattagatctaatatagcggatgtgctagcaccacatactgtactatgttatcacactttcttcatttttgcaagggaattggaagatttttttatttaacgtagacaattcccaacttcccaaaggccacatctccacggataatcaaggttttgctggttggcgctagaggagtatctgccttggctacgccacagaaagtttctacctttaaatcaactccccaatgtttaggaacatagataactgcattcccaaaaccgacttccactttcagagttgcgctatctcctaaaatctctgcattgtcataatatatcttggcatttccaaaaccaacttctacttggtcgtctaccaattcttgattttgcttgtagaaagtcccagtcctaaaagcaacttccttatctgtaagaatggtctttttaccatcataccaccattttttcccattccaagttctgttagaatgagtgagtgcgctgacacctattacgattaaaatacttgcccagaacaatgactgattgggaattggtaaaatgccataaaagtggttagcaatcattaaggctactagaactgtaaaagaggctgaagttaagtgacgacgcaacaaagctccaactgattgataggcaaaaaatgcaataccaagcaagggccaaatttgcccaccgaatgaagggattccaaaatttccttgtaataatattaaagctgccaatactagcaacacaataccaaatgctttctttttcatcttcttacctcatgtttcttagattttcttttaggagggattggtaatgtcgtgagacatgaacctccttgtgggtctgataaaaggaaatggtgcccgttcctgaaaaggacttgtccaccgagtaaacctgacggatatttgcaatagtcgacttggatacccgactgaaataacggggcaggatagactccaactcatagagtttaagccgaacctcgtaggcatctttctgggtatgagcataaattttgctaccttccgtctcaaagaagagaatttctgataagtccagataatattcacctgttcccttgtaaaaaatcaacctaggagacttggattcttgcaagaggcgctgtaaatccgcaatctcatctgtcaaagccgctgccttgatgacaatttcagtttcctctaaattgctgtcaatttcgattcgtaacttcattccatctcctttctgactctactatatcaaaggaaaaataagaaaacaagagcaaaaaagcaagtggttactttagatccgtaagtggttgtaaggctaccttaacttacaggtcaacatagaaataaaatcacaccccacacaagaccacaaatatagccaaccactacatccttgggataatgcactccccctaagactcttactagaccgaggaaagctgacaagaccaacaagataacccctacagataaactagcatgtaagcaagccatggagataatggttgctgaaaagacatgacgactgggcattgactgaccaggactatctctgtcaagcaagggtttaatagtccattcctcataaggcctaggggcattgattttcttacgaagaaaggacaaaatcacaaaacctgacgctggaataaacaaatagatcccgacctgtttcccaagtccttgttggagataggtagttgctaacaaggttagataaatcataggcataactactgtcatgaaccgattgaaagttcttaacaagctcagaagaaagggcttatttccaatgttaccggcaatgtggtcataccattcttgataatttttcatatattttctcatcacttattcaaattttgcttatagggaagcacttgtcttctagtatagtgcagaaaaagaaggccgtcaagccttctttgggtttattcttctgcttcgtcttctgtaaattgactgttgtagaggtcagcgtagaaaccagcttgcgccatcagctcatcatgatttccttgctcgatgatattaccattcttcataacaagaatcaaatcagcatttcggatggtagacaagcggtgagcgatgacaaaggaagttcttccctccatcaaacgatccatggctttctgaatcaattcctctgtacgggtatcaacagaagaagtcgcctcatctaggattaggagcggtgcatctttcagcaaagcacgagcgatggtcaagagttgtttttgtccgacagacaaggtcactgtgtcgtccaagacggtatcgtaaccatctggtagagtcataataaagtggtgaatccctacagccttgctagcttcaatcacgcgctcatcactaatacctgtttggttataaatgagattgtctcggatagtgccttcaaagag

SEQ ID NO: 75 - DNA, 5961 bp, Streptococcus mitis NCTC 12261 contig21
tggaatttcctactattgcaatatggctagcccctactatctggatgaagaagcactgaagtatattgattacgatttggatgttaaaatttttacagatggagagaaacgtctcttggacgttgaggagtatgagcgtcacaaacgcaaaatgaattattccgatgacttggactatattttaaaagaacatgtcaaaattcttgttgattggattaacaatggacgaggtcctttctcagaagcctatgtaaacatttggtacaagcgctatgtagaactaaagaatcggtaaagttgtcaaactggggttaagaccccggtttttttattttaaaaacccagctttacagctggggtgatttctatatatctaatttcgtaacagtaaatttgatgtgggaatagtctttttcaacatccttatccagcaagaaagctgtagcatctttcttaacctgaaccaggtcaatattctgagcttgggctgcatagacacaaccacaataacattgacggtaaatgtcatactcttcacacatctctaccgaacgtttgtagccttgatttttcttgaaatcacttggaagatagtgggttgtataaattttttgcacatcgattccgatactattaatggtttgagaattcttatgaggactgatggtcaaggctgagccaaagtagtcaaagcccaagtccatagccacttgagctgtcttatccagtcggtagtcaaagcaaacctggcaacggtcgccaccttcaggctcttcttccaaacctcgaaccagtttacgatattcgttaggttcataaggagcttctaggtattgaacgctattgccagttcgctcattgaaatcactgacaaactttttagtcacataggcacgcttatggtattctgccttgggatggatattagaattggcaaaatagattgtcacatctgcatacttggtcaaatattcgagggtataggtactgcaaggggcacagcaaacgtgcatgagaatggttggccgttgctcatttttctcccatacttgtaccatcttctgcatgacacggtcataattaatcttctgattgaggttcatcttgctcagaatttcttctacatcgatcatgttcttctcctttttatagtcttattttatcatataagttaggagagctcaaatctatttagaagtgaatatcataaaaaggaggaatagccattccctccttttgtgttttttataagttgttttctatagaaagcttacatcatcccacccatcatacttggatccattgctggagctggggctgctggttctggtttattggctacgactgcttccgtagtcaaaatcaagctggctacagatgctgcattttgtagagctgaacgactcactttaactgggtcgataatcccttgatcaatcatgttaacccattcgccagttgctgcattgaagcctgtaccaacttcagcatttttcaaacgatcgataacgatagagccttcaaatcctgcattgtgggcgatttgacgaacaggttcttccaaagcacggagaacaatattgcgacccgttgcttcgtctcctgttaattccaaatcagctacggcagggataacatttacaagggctgttccaccacctgcaacgattccttcttcaacagctgcacgagtagcgttgagggcatcttcaatgcggagtttcatttctttcaactcagtttcagttgcagctccgaccttgatgactgctacaccacctgacaatttcgccaagcgttcttgcaatttttcacggtcaaattcagaagttgtggtttcgatttgagacttgataactgcaacacggtgagaaatcgcttcaggatttccagcaccttctacgataaccgtgctatctttgtccacagttactctcgctgcttgaccaagtgcttcaattgtagcatctttcaactcaagacctaggtcttctgtgataactgttccgcctgttaagatggcaatgtcttcaagcatggctttgcgacggtcaccaaaaccaggtgccttgactgctaccacgttgaaggttccacgaatcttgttcaaaacaagagttggaagagcttcgccatctacatcatccgcaataatcaagagtggacgattgctttggagaatactttctaggagtggcaagatttcttggatatttgaaatcttcttatcagtaatcaaaatgtatggattttcaagatcagctaccattttttcgctatctgtcaccatgtactgtgaaaggtaaccgcggtcaaactgcattccttcaacaacttcaagctctgtttccataccacgtgactcttcgatagtgatgactccatctttgccaactttttccatagcttcagagatgtattcaccgactttttcagaacgagaagagacggctgcaacttgagcgatagcttctttgttggcaacaggaatagcattgtttttcaaggcttcaactgctgcagcaactgctgtttcaatcccacgacgaatgccaattggattggcacctgcagtgacgtttttgattccttcacggacgatagcttgggtcaagactgttgcagtcgtagtcccgtcacctgcgatatcattggttttagaagctacttctgataccaatttggcacccatattttcaaaatggtcttccaattcgatttctttggcaatagtcacaccgtcattggtaatcaagggtgaaccgaatgacttttcaagaacgacattacggccttttggtcccaaggttactttaacagtgtctgcaaggatatcgacaccacggaccatagctgaacgggcatcagatgaaaatttaatttcttttgacatacttactttctccttctatttttcaatgatagccaagatgttagcttcgcctacgatgatgtacttttcatcgccatctttgacatcaagacctgcgtgtgcttcaaccaagacacggtctccagctttaacacttggagcaaccaagtcaccgttcaaggtacgaacaccttgtccagtagccacaacttgagctgttttggttttttcttgggctgaacctgcgaggacaaaacctccaacagtttgttctttttcttctacttttaagaccacacggtcccctaatggtttcaacatctgatttcctccataatgagatagatatcattagcactctttacacttgagtgctaattcatagttctattgtatcacttggtcagaaatagtcaagaaaaaagtctgactttctcaatataaaaagcctgagaccaactcagactttttaatgcttaaaatggcaattcttcctcttccaaaaccaaatccgccaaatcttgtcctgcattattttcacgcatggcacgttgagcacgactttccaagagttggaatcctgtcacaaggacttcagtcacatagttcatctgaccatttttctcaaaacgacgggtacgaagttctccatccacagagataagactacctttagttgcgtagctggccaagctttctgctagtttgccccatagaaccatattgacaaagtcagcttcgcgctccccattttggtctttgtaacgacggttcacagcgatagttgctcgcgctactgacttgtcattgttggttttgtgcaattctggtgtagacgtcaaacgcccaatcatgataactttattatacatattttttcctcctacttatctattcgcagaaaatcaaaaaagttacagaaatttgtaacttttcgaggaaattttttactttttatgaaccatgaaacctgtcgcctgttgattggccataatggtcatatctgtaatctgcacacgacgaggttgactggtcacatagactactgtgtctgcaatatcctgagcttgcaaggcttctattccttggtaaacggacgcagctctctctttatcaccatgaaaacgtaccgtagaaaaatctgtttcgacaattcccggttgaatagtcgtcaccttgatatccgttgcgatggtatcaattcgcagaccatctgaaaaggtcttaaccgctgccttggtagctgaataaactgctgcacccgcataggcataaattcctgcggttgagcccatattgatgatatgtccttgattggcttttaccattgctggcaagaaacagcgagtgactgccatcaaacctttgacattggtatccaacatggtcagcatatccaactcttcatagttttgatatggagccaagccaagagccaaacctgcgttattgaccagaatatcaatctgacctatcgtttctagaatatcagagcagacagtctttaccatggtcatatctgtgacatctagcgaaaaagtccaaactgtctgatttgggaaggcttctgcaaactccgacttaagggcttctagtctatctgtccgtcgacctgttaaaacgatattctcaccctgctccagataagcacgcgcaatcgcttcaccgattcctgatgtcgcccctgtaatcacaacattttttgtcatcttatttccttctagctggtctatcagatactgacaacttcctaggtagtccagtgtttagctggatcaaatggagttccaacaacttggtcttctgataattcaataataccacgcttttgcggagcatttggcaaggcaagttcacgagggctacacatcatgccaaaactcttttcgccacgaagctcacctgggaaaataagattgcctttgggcatcatagctccaggaagagccacaatggttttcaacccgacacgcgcattgggagcccctgcaacgatttgcactgtcttgtcacttgcgactgcaacttggcagatgttgaggtggtcactatctggatgggctaccatctcaacaatttcaccaacaacaaacttaggttccttgtcattaacaatttcttctgtaaagccttctgcctgtaattcttggttcaaacgagcgacttgctcatctgataaaaatacttgaccgcgctctgcgatttcaaagaaagttgaaacttcgaaaatattccacgccactgtttccccattatctttgagaaaaacacgggctaccttgcctttgcgctccacatccagtttggcatctccgctatttttcacgatgaccataaggacatcaccgacatattctttattatatgtaaaaatcattgtttcctttttctcctatttcagtcctgctaaaaagtcgttaatttgttgcttgcttttacggtcgcgattaacaaaacgaccaatttccttgtctttttctagaacaacaaggctaggaattccgtaaacatcccagagtttggctaaatccatgtactggtctcggtccacccgaataaaggtgaactctggattggtctcctcaatttctggcaaggcaggatagatataacggcaatcgccacaccagtccgccacaaaaagaaaaaccttcttgccatctttttctactaaagatgctaattcttctaaacttgctggttgtatcataagacttcctcctcatagactaggtcttcatgttcatagacaaaggtataatgacggccatcctcaaaaatgacgccaccaaccaagctctctagactgctttcatagacttgaacatagagggtcgcaatttcccccatgtctgaaaaatggtctcgcacaatcgctgtcaactcttcctgagtcttcctgagcttacggtcatctgcaacttttttcgtagcaagggcaaggcttccaatacctagcagagccaagcctgccatccacatttttttagctttcataccattcattttaacacaaaaaaggctttaggacaaatgaggaaacagaaaaaaagcaagtaaaaagccccttcctttaaggaaaaggactt

SEQ ID NO: 76 - DNA, 4520 bp, Streptococcus mitis NCTC 12261 contig22
tgtatccgcttctgcacggcttttaatgacacatttatttggaatcaattgaactttttcaccagctgcaaggtactcagttactgctgcgaatacagcttcaactgctgctgctgagtctttcttagtcaattctgtagcttctgctactttagcgatcaaatcttgtttgtttgccatgttaatgattcctccaattttatttctaattaacaaatataatcatatcctaaaatcccttttaggtcaagttaaaaacgctatttcttcccattttatttatttttttaggagttgtaacgtactaaaacagcccaagcattctcacccgtgtgagtttgaataatagagcccgtttccaaaactgaaataggcttttcaacataagcttgtaagctttctttcatctcttttgcccaatcagcactaccagaatatgaaattccaatctctgctacagaacgttcagagagcgatgttatcagttcatccaaccattttttaaaagttttagctccacgacctttaactattggctgcaattcatggtccttcatctgcatgacaacacgtatattgagaagtgagctcaacaatccagttacacgcccaattcgtccacctttaacaaggttttccaaagtcgaaacgccaatatagagttctgtgtggtttttaacctcttctacatgagataagatttcctccaactctttgccttcttgcgctaattttgcagcctcaacaacttggaatttcaaggcttggtcagtgaaggaactatcaataactgttacatcggcagtagataagctagcaccttgacgtgccgcttctacagtgccagaaagggcgtgagacatatgaatagcaagaatctggctaccatctttgcataggtcttcaaaaacttcagcaaagacacctacaggtggctgacttgtttttggaagattcttactttcttgcatcaactgaagaaatttaccttcttctttcaaatccgcatcagaataaacaacattatcaatcattacagataacggaacaacagtgatatctaattgttttactagttcaggttcaatagtaacagatgaatcggttacaatcttaatttttgtcatagtatcaatctttctattttaggattcagattggttttcttacttttaattatatcaaaaaaagattaaaaatcctaatggagtcattcaaattttccttaaaaatttgatataatctacttataagaaaagaggtccctatgattaaaaaaatttatcccattttaaccattttactaggtgctgctatctatgcttttggtctaacttattttgtagttcctcatcatctctttgagggaggggcgacaggtattaccctcatcaccttttatctttttaaaatccctgtttctctcatgaacctgctgattaatattccccttttcatcctagcttggaagatttttggagcaaagtccctctattctagtttactaggaaccttagccttgtccgcctggttggccttttttgaacgtattccccttcatattgatcttcaaggtgatttactaatcactgcccttatagctgggattctattgggaattggtcttggaattatctttaatgctggaggtacaactggtggtactgatattgtagctcgtattctcaacaagtacactcatatatcaatgggaaaactgctctttatcttagatttttgtattctcatgctcattctcctaatcttcaaagatttgagattggtttcctacacgctcttatttgattttatcgtttcgcgtgtcattgatttgattggcgaaggtggctatgcaggtaaaggatttatgattattacaaaacgtcctgaccaacttgctaaggcgattaatgatgacctaggtagaggcgttactttcatctcaggtcaaggctactatagtcaaaaagatttgaagattatctactgtattgtcggaagaaatgaaattgtgaaaatgaaggaaatgattcatcgaattgatcctcaagcttttataactattacagaagcccacgaaatccttggcgaaggatttacctttgaaaaagaataaaaagaggtcttgtaggaccccaaaagttagactacatcatctatcttttgggttacagacaacctcttttttgtttactcaatctcttaagaccaattccgagctacttcttcatcagcctttaactgatccactaattggacgactgagtcaaatttagtcatgtctcgaatacgatcaagccaataaaccataacgggtttcaccataaatatcttgattaaaatcaaaaatattgacttcaaaacgtgcttcttctccatcaaaggtcacattttttccaacactagccatagcacgatacttctgtctttgaatctcaacatcaacaacataaacaccatctgctggcatataagtacgatctaaaagcactaaattcgctgttggataaccaatagtacgaccacgagcattgccatgaaccaccatgcctctcgatggaagcggtgcccccaaaagttctcctgcttctttcacatttccatctaaaatagcttgacggatacgtgttgaactaatctttcctttctcatcttctacaggtggaacaataataacttctccatcaaagtaatcctttaagtcctctgccgtttttttgtcagaaccaaatgtataatcaaaacctgcaacaataattttagcattcatagccttaatataggttgcaaaaaattcttctgccgtgagactagcaaatttgctactaaaatcaaggagatacaattcttctacgccttcacgctttaattttctctcacgttcagcagggttcaaaatatgcaaaaataggtcaggatgataaggctctaaagcgatctttggagattcattaaaggtcataactacgataggcaataaatcctttctcgcagccttgttggcaacacgaaatagttcttgatgtcccttatgtataccatcaaaatagccgagtacaacgaccgaatcggatggtgtgccaatatctttttgattttttataggaatagtaataatcataaaataattatatcatagtgatagctatttctgaaccagaaaatctgaaatgtcgtttttttaagctgaagtgtagcattttagaagaattttgtttttgaaatcgtaatacagaacaagagattgacgtaagaatcttgaaatcagaaaaacgcatcacatcaacccttaaaacttgatataatgcgctttattatgaaaagttctagtaaattctttataaaatcaacttccagcagccttttcactttttattaataagttctttcttcaccttggctagtcaagataacaggtccatctttcgtaatgacaaattggtgttcatactgacatgacaatccaccatcaatggtcttatgcgcccaaccagtcttcatatctgtatcaatttcccagtcacctgtattgatcattggttcaatggttaagaccattccttcacgaagacggagtccacgaccagcaataccatagttaggaaccattggctcttcgtgcatggttgggccaacaccatgaccaaccaaatcacgcactacaccgtatccacgactttcagcatattcttgaatagctgctccaatatcaccaatacggttcccaacaacggcttgctctatccccttatacatggcttctttagttacatccatcagatttttcacttcttcggacggtgtaccaacagcataagcccaacaagagtctgctaggccaccagaatagctctgagtgtattttttcatttgttcaacattgttgaagtttaattttgagacattcaggtcagatttcgcaattggacctcccaaaaccatatcaactttgagcaaatcaccatctttcaagatatagtgacgagggaaagcatgagccacttcatcattaagagagcaacaggtagcataaggatagtccatcatggcaccatcaaccccaatctgaagtggaaggaaattctcttccttgcaacgacgtcggacatactcttcaacttcccacatatctacgcctggcttaatcaaatcacgtaagccgatatgaatacttgctagaaaatcaccagccttgtccatagcttcgatttcacgagctgattttaatgttatcattttttctcctagtttctaattaattttaacagtcacatttgcttttgaaacaatctgatgaccatgataaatatcgtaatcaataatagctgatcgtctagtatgatggatgatgcgtgcttgaatgcgcagtatatcatctatctgaactgcttgcaaaaagtagatcaacatctgctcaataatgagatttcgaccactattcacaactaaatcttgagtcatgtgggtcagaatttctgccaatacaccattagccaaaacaccgttcttctctagcataa

SEQ ID NO: 77 - DNA, 3240 bp, Streptococcus mitis NCTC 12261 contig23
taactgagtaccttgcagctggtgaaaaagttcaattgattggttttggtaactttgaagttcgtgagcgtgctgcacgtaaaggtcgcaacccacaaactggtaaagaaatcaaaattgcagcttctaaagttccagcattcaaagctggtaaagctcttaaagacgctgttaaataatcaaccttccaaaagcctattgtatcaagctttctagcttgggcagtaggctttttttgtgtataggaggcaaaaaagggccagaatctgaatgaactagtaccggaaaatatttcaagtacagactaattcaaattgcgtagcagaaatcatacaaatgaaattgattatagtaaaataggattagaattattaagaaagttggttttttattggaaacgatagtattttcaatctccgtttttttagcagggatcttgtccttcttttccccttgcatttttcctctgttacctgtttatactggaattttgctggatgatcaggaaagtgcaaaaagtttttctttgtttgggagaaaagttgcgtggtccggcttgattcgaacgctttgctttatcgtaggcatttcactcattttctttattctaggatttggtgctggttactttgggaatattctctatgccaattggtttcgctataccatgggaacaattattatcattttaggtcttcaccagatggaaatttttcattttaagaaattagaggttcaaaaaagctttacttttaagaaatcagaagccaatcgttattggtcggcctttttactcggtattacctttagctttggttggacgccttgtattggtcctgttttgagttctgttttagcgcttgcggcttctggaggaaatggcgcttggcaaggtgcaatctataccttgatttacactctggggatggcaattcctttcttgcttttggctctagcttcaggtgtagtaatgccttattttagtaaaattaaacgtcatatgatgctactgaagaaaaatggtgggttccctcatattttaatgggaattttgttactattaggacaagtaaatgttctagctggaatttttgaataaaggagaaaaagatgaaaaagtaatgtttgctgccttaagcctcttgtcattagtcgtattgatagcctgtggtgaggaagagactaaaaagactcaagctccacaacaatccccaaaacaacagcaacaaacgactgtacaacaaattgctgttggaaaagatgcgccagacttcaccttgcaatctatggatggtaaagaagttaagttatctgattataaggggaaaaaagtctacttgaagttttgggcttcatggtgtggtccatgtaagaaaagtatgcctgagttgatggaattagcggcgaaaccagatcgtgattttgaaattcttagtgtcattgcaccaggaattcaaggtgaaaaaactgtcgagcaattcccacaatggttccaagatcaaggttataaggatatcccagttctttatgacacaaaagcaaccacattccaagcttatcaaattcgaagcattcctacagaatacctgattgacagtcaaggaaagattgggaagattcaatttggtgttatcagcaatgcggatgcagaagcagcctttaaagaaatgaactagaatagataaaaatctgattacaagagagtagtcagatttttttaggaaaacattttataaatattcacaaatatcctatatttatggtaaaatagaatcatcattttattttggagtcaaagatgaatatatttagaacaaagaatgttagtttggataaaacagagatgcacaggcatttgaagttatgggatttgattttgctgggtatcggagccatggtagggacaggcgtctttacaattactggtactgcagccgcaactctagcgggtccagccctagtgatttcaattgtcatttctgccttatgtgtgggattatcagctctcttttttgcagaatttgcttcacgagtacctgctacaggtggtgcctacagttatctctatgctattttaggagaattcccagcctggttggcaggttggttaaccatgatggagttcatgacagccatatcgggtgtggcttctggttgggcagcgtattttaaagggcttctctctcaatacgggatagcccttcctcaggctttaaatggtacctttaatcctcaagcagggacgtttgttgatttattacctattcttgtcttggtcttggtgacctcgcttgttctacttaatgcgaaagccgccttacgctttaattcaattctagttattttgaaattttctgctttagctctctttgttttagtaggaatctggcatatcaagcttgataactggagtaattttgctccctatggttttggacaaatctatggtgccagtactggtattatggctggtgcgtccttgatgttctttggttttttggggtttgaatccatctctatggctgtagatgaggtcaagactcctcaaaaaaatattcctagagggattgtcttatcgctttctatcgtaaccattctttatgccttggtgacgcttgttttgactggtgtggttcactatagtcatctaaatgtcgacgatgccgttgcctttgcccttcgtagcgttgggattagttgggcagctagttatgtgtcattagtggctatcttaaccttgattacggtttgtatctcaatgacttatgccctatctcgtatgatttacagtttagcgcgtgacggattgatgcctgctgcctttaaagaactgaccaaaacaagcaaggtaccaaaaaatgctactatcttgacaggtctagcttcagcagtagcagcaggaatgttccctcttgctagtatcgcagccttcttaaatatttgtaccttggcctacttgatcatgctggcttatggtctgattcgattacggaaagaaaaaggaatgcccaaagcaggagaatttaaaacaccactggtacccttattaccgattttatcaatcatcatttgtttatcatttatgttgcagtataatatggaaacctggattgctttcctagttgcattgttagtaggaagtattatttactttacttatggttataagcattctaccatagaagaataatactcttcgaaaatctcttcaaaccacgtcagcttcgccttgccgtatgc

SEQ ID NO: 78 - DNA, 4773 bp, Streptococcus mitis NCTC 12261 contig24
tgatgcattcaaaatctataactaattgatagaaattaaggtgaaggcgagttgggggactaactcgcttttataatcaattcatctcttttttaagaggatggattgtgatagtatgagatagtctaggagaaaatgatgttaagttcaaaagatataatcaaggctcacaaggtcttgaatggtgtggttgtgaataccccactggattacgaccattatttatcggagaagtatggtgctaagatttatttgaaaaaagaaaatgcccaacgtgttcgctcttttaaaattcgtggtgcctattatgccatttcccagctcagcaaggaagaacgtgagcgtggggtagtctgcgcttctgcggggaatcatgcgcagggagttgcctatacttgcaatgaaatgaagattcctgcaactattttcatgccaattactactccgcaacaaaagattggtcaagttcgcttttttggtggggacttcgtgactattaaattagttggagatacttttgatgcctcagccaaagcagctcaagaatttacagtctctgaaaatcgtacctttattgatccctttgatgatgcccatgttcaagctggtcaagggacagttgcttatgagattttagaagaagctcgaaaagaatcgattgattttgatgctgttttggtccctgttggtggcggtggtctcattgctggggtttctacctatatcaaggaaataagtccagagattgaagtcattggggtagaggctaatggagcgcgttccatgaaggctgcctttgaagctggtggaccagtcaaactcaaagaaattgacaaatttgcggatgggattgctgtgcaaaaggtaggtcagttgacctatgaagcaactcgtcaacatgttcaaactttggtaggtgtcgatgagggattgatttctgaaaccttgattgacctttattctaagcaagggatagtcgcagagcctgctggagcagctagtatcgcctctctagaggttttagctgaatatatcaaggggaaaaccatttgttgtatcatttctggaggaaataatgatatcaaccgtatgccagaaatggaggagcgcgccttgatttatgatgggatcaagcattactttgtggttaattttccacagcgtccaggggccttgcgtgagtttgtaaatgatatcttggggccaaatgatgatatcacacgttttgagtatattaagcgagctagcaaggggacaggcccagtattaattgggattgccttggcagataagcatgattatgcaggattgattcgtcgaatggaaggttttgatccagcttatattaacttaaatggtaacgaaacgctctataatatgcttgtctgaggactaataaaaaaatatcatattatttgcacaattgatgtataggtgctataatgaagatgaagaaagggggcgattcctatggacttaggaaatcggttacgctatttctatcataactcattatagtacctatgttttttgattcagtttatagtaagggagtaaaattacttgttatatgtaaggagttttttgaaatctactattttatatatagctaatctgaaatttggctaaatataataggaattagaaaaaataatcaatactaatgagaagccttatactgagttaactgagaagagtgataagatactaagaagataaaaacagtggaaaatgttggaagataggatactattgtttcctaactactcatctttttataggtttgaagaaataaaaaggaatattgataaagtaaataaatagtacaagttgaccaaatgattgaatgctggtgtagacaggaaaagtctaaaagtagaaaaatactcgttagaaatggtttagagcagaagatttttttgtcaaatttttttgttttgcagtggaataaataatatgaaataagactagaatatgtctagattatcgagaatcagcatctgacaaatatgaatattattacatgaataagatttaataatacagttgctttaaagaactataaaaattgttttcggcaatgaaaaacctatatattataaactttaataagatagcaagtaaaaataagggcgtttattttattgaatatatgtttttttattgacaaaaagcataaaaacgtatacaattaaaagcgtatacaattaaatatcgtaaataagaaaataggagaaggacatggctaagtcaaactttgaaaaagtagaatcagttgttggctgggttcgtgataagaaaatcacaggctaccgtatctctaaagaaacgaatgcgcgtgaaatgtctatcattgctctagcacaggggcgtgcaaaagtaaaaaatatttcgtttgaaacggctctaggtttaattgatttctatgataaaaatcatgaaaaatttgaagattaatctttggataatggcggattcttgaatagggtctgccttttcattttttggctagtaaaaagactgcacggttgatgcagccttttctttttatttgagatagcgttgaaggaattcttttgtacggtcttctttaggattggtgaagaggtcttctggtttgccttcttcagcaatcacacctttatccataaagataacacggtgagagacatcacgggcgaattccatttcgtgagttacgacaatcatagtcaagccttcttgagccaggtcctgcatgattttgaggacttctccaaccatttctggatcgagagctgatgttggttcatcaaagagaatagcatctggattcatggagagggcacgagcgatggccacacgttgtttttgaccacctgagagttgttttggtttcgcttgccagtagcgttctcccatgccgaccttttccaggttttctttggcaatcttttcagcttctgtacgttcgcgtttaaggacagttgtctgagcgacaattgtgttttcaagaacgttgagattttcaaagaggttaaaggattggaacaccatccccaacttttcacggtattgcgtgaggtcatagcctttttcgaggacgttttgtccatgataaaggatttgtccatcagttggcgtttcaaggaggttaatggagcgtaggaaggttgattttccgcttccagagcttccgatgatagagattacctctcccttgtggacagtgagtgaaatgtcttttagcacttcgttttgtccataggattttttgaggtgtttaatttcaaggattgcttgtgtcattatttcaaatcctccgtttgcatttggttagcacctgtagtataggtatccatgtccatgcggcgttcgatgaagcgtaggatacgtgttacggtgaaggtgaggacaaagtaaatcacggcgatgattgtaaatgtttggaagtattgataggtttgagttgccacggtatttcctgagaaataaagttcaacaacagagataacgttcaatacagatgtatctttgatattgatgacaaattcattaccagttgctggtaggatgttacggactacttgaggtaggacaatcttacgcatggtttggttatgggtcataccaagagcagtcgctgcttcaaattgtcccttatcaactgctaggataccaccacggacgatttcagtcatgtaggcaccggtgttgatcgaaacgatgaagatagcagccagtgtgcggtcaaggttgataccgaaagcttgagcagttccgtagtagataaccatcgattgaacgatcattggcgttccacggaaaatttcgatatagacattgagaccccatccgactagtttttgtaggctgtaaatagctttgttttcagagagaggagcagtacggaaaacaccaatagcaagaccgataatgagacctatgatggttccgacgatagagattaaaagagtgatacccgcaccacgcaagagttgttgccagttttcagaaagaattttagcgacttggttaaagaaactactgctagtctcttcagttgttgttgcttcggcaggttgctccttgatcatacgatccattagggcaacttgctcatcttttgaaatggtttcaatgctggcattgatttggctaatacgagtgtcatctttacgaagtccaatggcaatagctgtatcttcttcccccgttttgaaacctggttctacttgaaccatcttgaacttagagttagcagcttcggcagtcagagcttctggacgttcagaaacataggcatcaatgacaccagcctcaagtgcttggcgcatttgagcgaagtctcccatggcagtttcttttttagcgcctgagatttgggaaatcaagtcataaaggtaaacaccttgttgagaagtgattttcgctccattaaagtcatccaaagatttggcatttgcataggcagaatcttttttgacaagtaggacaggctcgctagtgtagtagctgcttgaaaaggcgatttcttgtttgcgttcagcggttggactcatacctgcgataatcatgtcaatcttaccagaagtaagggcaggaactaaaccttcccacttggttttaacaaccaaaggttctttacctaagtccttagcgattttcttggcaatttggacatcgtatccattggcatactggttggttccatcgattttgacagctccgttgctatcatcatcctgggtccagttaaagggagcatatgctgcttccatcccgatgcgtaaa

SEQ ID NO: 79 - DNA, 3637 bp, Clostridium difficile
atgagtttggttaatagaaaacaattggaaaaaatggcaaacgtaagatttcgtacccaagaagacgaatacgtagccattctagacgcacttgaagaatatcataatatgagtgaaaatacagtagtcgaaaaatacttgaagttaaaagacattaatagtttaacagatatctacatcgatacttacaaaaagtctggaagaaataaagctctcaaaaaatttaaagaatacttggttactgaggtactagaattaaaaaataacaatttaacacctgttgaaaaaaatctacattttgtagcaattggaggacaaattaatgacacggctattaattacattaatcaatggaaagatgtaaattctgattataatgtaaatgttttttatgattctaacgcttttttaattaatacacttaaaaagaccgtagttgagtccgccattaacgacacattggaatcttttcgagagaatctcaacgatccacgcttcgattataacaaatttttccgtaaacgaatggaaatcatttatgacaaacaaaaaaatttcatcaattactataaggctcagagagaagaaaatcctgaattaatcatcgatgacattgtgaaaacctatctatccaacgaatatagcaaagaaattgacgaactaaacacatatatcgaggaaagtctcaataaaattactcaaaactcaggtaatgatgttcgaaattttgaagaattcaaaaatggtgaatcatttaatctatatgaacaagagcttgttgagagatggaacctcgctgcagcctccgatattttgcgtattagtgctttgaaagagattggtggaatgtatttggatgttaatatgttaccaggtatccagccagatctatttgaatctatcgaaaaacctagttcagtaactgtagatttttgggaaatgactaaacttgaagccattatgaaatataaagaatacattccagaatatactagcgaacatttcgacatgttagatgaagaggtacaaagtagtttcgaatcagtccttgcatccaagagcgataaaagcgagatttttagtagcctaggtgatatggaggcttcaccattagaagtgaaaattgcatttaatagtaaaggtatcatcaaccaaggattaatttcagtcaaagacagttactgcagcaatctcattgtgaagcaaattgaaaatagatacaaaatcctcaataactcactaaacccagctattagtgaagataatgactttaatacaacaactaatacatttatcgattcaattatggctgaagccaacgctgataacggaagatttatgatggagttaggtaaatacttaagagttggattctttcctgatgtcaaaactactatcaatttatcaggtcctgaggcctatgcagcagcttatcaagatttgctaatgtttaaagagggtagcatgaatattcatctcatcgaggccgatttaagaaattttgaaatctctaaaactaatatctcacaatcaacagagcaagaaatggcctctttatggtctttcgacgacgcacgcgccaaggcacaatttgaagagtataagcgtaattacttcgaaggttctcttggagaagatgataacttagactttagccaaaatattgttgtagacaaagaatacttacttgaaaaaatcagctcactagcacgatcatcagaacgaggctatattcactacattgtacaactccaaggagataaaattagctatgaagccgcttgtaatctattcgccaaaacgccttatgactccgtcttgtttcaaaagaacatcgaagactctgaaatcgcttattactataatccaggtgatggagaaattcaagaaatcgataaatataaaattccttccattatttctgatcgcccaaaaatcaaactcacttttattggccatggaaaagacgaatttaatacagatatcttcgccggtttcgacgttgactcattatctacagaaattgaagccgctatcgacctagccaaggaagacatctcaccaaagtctatcgagattaatctactcggttgtaatatgtttagctactctattaacgttgaagagacttatccaggaaaattgttactaaaagtaaaagacaaaattagtgaattaatgccttcaatttctcaggatagtattattgttagcgccaatcaatatgaagtacgtatcaactcagagggtcgccgtgaactccttgatcatagtggtgaatggattaataaagaagagagcggggggtcaggcaaaatggttacaggagtcttcaaaggtcctaatggattcgagtattttgcaccagctaacacacataacaataacattgaaggacaagctatcgtttatcaaaacaaatttcttacacttaatggcaaaaaatattatttcgacaacgactctaaagcagtaacaggatggcagacaattgatggaaagaaatactactttaacttgaacacagctgaagccgctacaggttggcaaacaattgatggaaagaaatattattttaatttaaacaccgctgaagcagctacaggatggcagactattgacggaaaaaagtattatttcaacacaaatacatttattgctagtacgggttacacaagcattaatggtaaacatttctattttaatacagacggaattatgcaaatcggtgtctttaaaggaccaaatggattcgagtattttgctcctgctaataccgacgctaacaatattgaaggacaagctattttataccaaaacaaatttttaacactcaacggaaaaaaatattacttcggttctgattctaaggcagtcacaggtttgcgaacgattgatggtaagaaatattattttaatactaataccgctgtggcagtcacaggctggcaaacgattaacggtaaaaaatactattttaacactaatacatctattgcctcaactggatatacgatcatctcaggaaaacatttttatttcaatacagatgggattatgcagattggtgtctttaaaggaccagacggatttgaatacttcgcaccagctaacacagatgctaataatatcgaaggacaagccattcgttatcaaaatcgatttctctatctacatgataatatttattatttcggaaataattcaaaggcagctacgggatgggttacaatcgacggtaatcgttactattttgaaccaaatacagctatgggagctaacggttataaaacaatcgataacaaaaatttctattttcgaaatggtctccctcaaattggtgttttcaaaggttctaacggtttcgagtactttgcccctgcaaacaccgatgctaacaatattgaaggtcaggcaattagatatcaaaatcgatttctacatctccttggtaagatctactacttcggtaataacagcaaggctgtaactggttggcaaactatcaacggaaaagtatattattttatgccagataccgccatggcagccgctggaggattatttgaaatcgacggcgtcatctatttttttggtgttgatggagtcaaagccccaggcatttatggcagacctt

SEQ ID NO: 80 - protein, 1212 aa, Clostridium difficile
MSLVNRKQLEKMANVRFRTQEDEYVAILDALEEYHNMSENTVVEKYLKLKDINSLTDIYIDTYKKSGRNKALKKFKEYLVTEVLELKNNNLTPVEKNLHFVAIGGQINDTAINYINQWKDVNSDYNVNVFYDSNAFLINTLKKTVVESAINDTLESFRENLNDPRFDYNKFFRKRMEIIYDKQKNFINYYKAQREENPELIIDDIVKTYLSNEYSKEIDELNTYIEESLNKITQNSGNDVRNFEEFKNGESFNLYEQELVERWNLAAASDILRISALKEIGGMYLDVNMLPGIQPDLFESIEKPSSVTVDFWEMTKLEAIMKYKEYIPEYTSEHFDMLDEEVQSSFESVLASKSDKSEIFSSLGDMEASPLEVKIAFNSKGIINQGLISVKDSYCSNLIVKQIENRYKILNNSLNPAISEDNDFNTTTNTFIDSIMAEANADNGRFMMELGKYLRVGFFPDVKTTINLSGPEAYAAAYQDLLMFKEGSMNIHLIEADLRNFEISKTNISQSTEQEMASLWSFDDARAKAQFEEYKRNYFEGSLGEDDNLDFSQNIVVDKEYLLEKISSLARSSERGYIHYIVQLQGDKISYEAACNLFAKTPYDSVLFQKNIEDSEIAYYYNPGDGEIQEIDKYKIPSIISDRPKIKLTFIGHGKDEFNTDIFAGFDVDSLSTEIEAAIDLAKEDISPKSIEINLLGCNMFSYSINVEETYPGKLLLKVKDKISELMPSISQDSIIVSANQYEVRINSEGRRELLDHSGEWINKEESGGSGKMVTGVFKGPNGFEYFAPANTHNNNIEGQAIVYQNKFLTLNGKKYYFDNDSKAVTGWQTIDGKKYYFNLNTAEAATGWQTIDGKKYYFNLNTAEAATGWQTIDGKKYYFNTNTFIASTGYTSINGKHFYFNTDGIMQIGVFKGPNGFEYFAPANTDANNIEGQAILYQNKFLTLNGKKYYFGSDSKAVTGLRTIDGKKYYFNTNTAVAVTGWQTINGKKYYFNTNTSIASTGYTIISGKHFYFNTDGIMQIGVFKGPDGFEYFAPANTDANNIEGQAIRYQNRFLYLHDNIYYFGNNSKAATGWVTIDGNRYYFEPNTAMGANGYKTIDNKNFYFRNGLPQIGVFKGSNGFEYFAPANTDANNIEGQAIRYQNRFLHLLGKIYYFGNNSKAVTGWQTINGKVYYFMPDTAMAAAGGLFEIDGVIYFFGVDGVKAPGIYGRP

What is claimed:

1. An integrally transformed non-pathogenic, commensal bacterium that can express a nucleic acid molecule of a foreign polypeptide therein, wherein the nucleic acid molecule that encodes the foreign polypeptide is stably integrated into genomic DNA of the bacterium, wherein the bacterium is Streptococcus mitis.

2. The integrally transformed non-pathogenic, commensal bacterium of claim 1, wherein the nucleic acid molecule of the foreign polypeptide comprises an antigen that elicits an immunogenic response in the individual, a vaccine antigen, an inhibitor of a pathogen, an immune booster, a modulator, a composition used in the treatment of a disease or condition, or a combination thereof.

3. The integrally transformed non-pathogenic, commensal bacterium of claim 2, wherein the vaccine antigen is selected from the group consisting of C. difficile antigens.

4. The integrally transformed non-pathogenic, commensal bacterium of claim 2, wherein an inhibitor of a pathogen is a small, antimicrobial peptide that can have an effect against the pathogen C. difficile.

5. The integrally transformed non-pathogenic, commensal bacterium of claim 2, wherein the immune booster and modulator is selected from the group consisting of: interleukins, interferons, and cytokines such as IL-1, IL-2, IL-4, IL-6, IL-8, IL12, IL-17, IL-2 IL-21 and IL-22 and cytokines GMCSF, MCSF, MIP1 alpha and beta, TNFalpha and beta, IFNalpha and beta and TGFbeta.

6. The integrally transformed non-pathogenic, commensal bacterium of claim 1, wherein the nucleic acid molecule coding for a foreign polypeptide that is expressed in the cytoplasm, in the cell membrane or cell wall or exports to the cell surface of the bacterium.

7. The integrally transformed non-pathogenic, commensal bacterium of claim 3, wherein the nonpathogenic, commensal bacterium comprises S. mitis and the gene that expresses or secretes a polypeptide on the cell surface of the bacterium is selected from the group consisting of: serine-rich GspB homologue or the pullulanase polypeptide.

8. The integrally transformed non-pathogenic, commensal bacterium of claim 2, wherein the foreign polypeptide comprises a C. difficile vaccine.

9. The integrally transformed non-pathogenic, commensal bacterium of claim 8, wherein the HIV antigen is TcdA, TcdB, or a TcdA/TcdB fusion construct of both antigens.

10. The integrally transformed non-pathogenic, commensal bacterium of claim 9, wherein the nucleic acid molecule that encodes the TcdA/TcdB fusion construct has a sequence comprising SEQ ID NO:79.

11. The integrally transformed non-pathogenic, commensal bacterium of claim 10, wherein the TcdA/TcdB fusion construct has a sequence comprising SEQ ID NO: 80.

12. The integrally transformed non-pathogenic, commensal bacterium of claim 7, wherein a nucleic acid molecule that encodes the TcdA/TcdB fusion construct is inserted into a gene that expresses or secretes a pullulanase polypeptide, to thereby obtain a gene that expresses or secretes a TcdA/TcdB/pullulanase fusion protein.

13. A polypeptide expressed by the integrally transformed non-pathogenic, commensal bacteria of claim 1.

14. A method of delivering a foreign protein to an individual to induce mucosal immunity, the method comprises: contacting the integrally transformed non-pathogenic, commensal bacteria of claim 1 with tissue of the oral cavity or upper respiratory tract of the individual in an amount sufficient for colonization of said bacteria.

15. The method of claim 18, wherein the amount of the integrally transformed bacteria that is contacted with the oral cavity or upper respiratory tract ranges between about 1×10<3> and about 1×10<10>.

16. The method of claim 19, further comprising subjecting the individual to an antibiotic prior to contacting the integrally transformed non-pathogenic, commensal bacteria with the individual.
